United States Patent Application Publication US 2026/0109938 A1 - sequence listing, part 11

SEQ ID NO: 6 - DNA, 3977505 bp, Escherichia coli (residues 1-1,988,753 of 3,977,505)
  source 1..3977505: mol_type = genomic DNA
agcttttcattctgactgcaacgggcaatatgtctctgtgtggattaaaaaaagagtgtctgatagcagcttctgaactggttacctgccgtgagtaaattaaaattttattgacttaggtcactaaatactttaaccaatataggcatagcgcacagacagataaaaattacagagtacacaacatccatgaaacgcattagcaccaccattaccaccaccatcaccattaccacaggtaacggtgcgggctgacgcgtacaggaaacacagaaaaaagcccgcacctgacagtgcgggcttttttttttcgaccaaaggtaacgaggtaacaaccatgcgagtgttgaagttcggcggtacaagtgtggcaaatgcagaacgttttctgcgtgttgccgatattctggaaagcaatgccaggcaggggcaggtggccaccgtcctctctgcccccgccaaaatcaccaaccacctggtggcgatgattgaaaaaaccattagcggccaggatgctttacccaatatcagcgatgccgaacgtatttttgccgaacttttgacgggactcgccgccgcccagccggggttcccgctggcgcaattgaaaactttcgtcgatcaggaatttgcccaaataaaacatgtcctgcatggcattagtttgttggggcagtgcccggatagcatcaacgctgcgctgatttgccgtggcgagaaaatgagcatcgccattatggccggcgtattagaagcgcgcggtcacaacgttactgttatcgatccggtcgaaaaactgctggcagtggggcattacctcgaatctaccgtcgatattgctgagtccacccgccgtattgcggcaagccgcattccggctgatcacatggtgctgatggcaggtttcaccgccggtaatgaaaaaggcgaactggtggtgcttggacgcaacggttccgactactctgctgcggtgctggctgcctgtttacgcgccgattgttgcgagatttggacggacgttgacggggtctatacctgcgacccgcgtcaggtgcccgatgcgaggttgttgaagagcatgtcctaccaggaagcgatggagctttcctacttcggcgctaaagttcttcacccccgcaccattacccccatcgcccagttccagatcccttgcctgattaaaaataccggaaatcctcaagcaccaggtacgctcattggtgccagccgtgatgaagacgaattaccggtcaagggcatttccaatctgaataacatggcaatgttcagcgtttctggtccggggatgaaagggatggtcggcatggcggcgcgcgtctttgcagcgatgagtcgcgcccgtatttccgtggtgctgattacgcaaagttcttccgaatacagcatcagtttctgcgttccacaaagcgactgtgtgcgagctgaacgggcaatgcaggaagagttctacctggaactgaaagaaggcttactggagccgctggcagtgacggaacggctggccattatcagcgtggtaggtgatggtatgcgcaccttgcgtgggatcagcgcgaaattctttgccgcactggcccgcgccaatatcaacattgtcgccattgctcagggatcttctgaacgcagtatctctgtcgtggtaaataacgatgatgcgaccactggcgtgcgcgttactcatcagatgctgttcaataccgatcaggttatcgaagtgtttgtgattggcgtcggtggcgttggcggtgcgctgctggagcaactgaagcgtcagcaaagctggctgaagaataaacatatcgacttacgtgtctgcggtgttgccaacagcaaggctctgctcaccaatgtacatggccttaatctggaaaactggcaggaagaactggcgcaagccaaagagccgtttaatctcgggcgcttaattcgcctcgtgaaagaatatcatctgctgaacccggtcattgttgactgcacttccagccaggcagtggcggatcaatatgccgacttcctgcgcgaaggtttccacgttgtcacgccgaacaaaaaggccaacaccagcagcatggattactaccatcagttgcgttatgcggcggaaaaaagccggcgtaaattcctctatgacaccaacgttggggctggattaccggttattgagaacctgcaaaatctgctcaatgcaggtgatgaattgatgaagttctccggcattctttctggtagcctttcttatatcttcggcaagttagacgaaggcatgagtttctccgaggcgaccacgctggcgcgggaaatgggttataccgaaccggacccgcgagatgatctttctggtatggatgtggcgcgtaaactattgattctcgctcgtgaaacgggacgtgaactggagctggcggatattgaaattgaacctgtgctgcccgcagagtttaacgccgagggtgatgttgccgcttttatggcgaatctgagtcaactcgacgatctctttgccgcgcgcgtggcgaaggcccgtgatgaaggaaaagttttgcgctatgttggcaatattgatgaagatggcgtctgccgcgtgaagattgccgaagtggatggtaatgatccgctgttcaaagtgaaaaatggcgaaaacgccctggccttctatagccactattatcagccgctgccgttggtactgcgcggatatggtgcgggcaatgacgttacagctgccggtgtctttgctgatctgctacgtaccctcagttggaagttaggagtctgacatggttaaagtttatgccccggcttccagtgccaatatgagcgtcgggtttgatgtgctcggggcggcggtgacacctgttgatggtgcattgctcggagatgtagtcacggttgaggcggcagagacattcagtctcaacaacctcggacgctttgccgataagctgccgagtgaaccacgggaaaatatcgtttatcagtgctgggagcgtttttgccaggaactgggtaagcaaattccagtggcgatgaccctggaaaagaatatgccgatcggtagcggcttaggctccagtgcctgtagcgtggtcgcggcgctgatggcgatgaatgaacactgcggcaagccgcttaatgacactcgtttgctggctttgatgggcgagctggaaggccgtatctccggcagcattcattacgacaacgtggcaccgtgttttctcggtggtatgcagttgatgatcgaagaaaacgacatcatcagccagcaagtgccagggtttgatgagtggctgtgggtgctggcgtatccggggattaaagtcagcacggcagaagccagggctattttaccggcgcagtatcgccgccaggattgcattgcgcacgggcgacatctggcaggcttcattcacgcctgctattcccgtcagcctgagcttgccgcgaagctgatgaaagatgttatcgctgaaccctaccgtgaacggttactgccaggcttccggcaggcgcggcaggcggtcgcggaaatcggcgcggtagcgagcggtatctccggctccggcccgaccttgttcgctctgtgtgacaagccggaaaccgcccagcgcgttgccgactggttgggtaagaactacctgcaaaatcaggaaggttttgttcatatttgccggctggatacggcgggcgcacgagtactggaaaactaaatgaaactctacaatctgaaagatcacaacgagcaggtcagctttgcgcaagccgtaacccaggggttgggcaaaaatcaggggctgttttttccgcacgacctgccggaattcagcctgactgaaattgatgagatgctgaagctggattttgtcacccgcagtgcgaagatcctcagcgcgtttattggtgatgaaatcccacaggaaatcctggaagagcgcgtgcgcgcggcgtttgccttcccggctccggtcgccaatgttgaaagcgatgtcggttgtctggaattgttccacgggccaacgctggcatttaaagatttcggcggtcgctttatggcacaaatgctgacccatattgcgggtgataagccagtgaccattctgaccgcgacctccggtgataccggagcggcagtggctcatgctttctacggtttaccgaatgtgaaagtggttatcctctatccacgaggcaaaatcagtccactgcaagaaaaactgttctgtacattgggcggcaatatcgaaactgttgccatcgacggcgatttcgatgcctgtcaggcgctggtgaagcaggcgtttgatgatgaagaactgaaagtggcgctagggttaaacagcgctaacagcattaacatcagccgtttgctggcgcagatttgctactactttgaagctgttgcgcagctgccgcaggagacgcgcaaccagctggttgtcagcgtgccaagcggaaacttcggcgatttgacggcgggtctgctggcgaagagtctcggtctgccggtgaaacgttttattgctgcgaccaacgtgaacgataccgtgccacgtttcctgcacgacggtcagtggagtcccaaagcgactcaggcgacgttatccaacgcgatggacgtgagtcagccgaacaactggccgcgtgtggaagagttgttccgccgcaaaatctggcaactgaaagagctgggttatgcagccgtggatgatgaaaccacgcaacagacaatgcgtgagctaaaagaactgggctacactagcgagccgcacgctgccgtagcttatcgtgcgctgcgtgatcagttgaatccaggcgaatatggcttgttcctcggcaccgcgcatccggcgaaatttaaagagagcgtggaagcgattctcggtgaaacgttggatctgccaaaagagctggcagaacgtgctgatttacccttgcttagtcataatctgcccgccgattttgctgcgttgcgtaaattgatgatgaatcatcagtaaaatctattcattatctcaatcaggccgggtttgcttttatgcagcccggcttttttatgaagaaattatggagaaaaatgacagggaaaaaggagaaattctcaataaatgcggtaacttagagattaggattgcggagaataacaaccgccgttctcatcgagtaatctccggatatcgacccataacgggcaatgataaaaggagtaacctgtgaaaaagatgcaatctatcgtactcgcactttccctggttctggtcgctcccatggcagcacaggctgcggaaattacgttagtcccgagtgtaaaattacagataggcgatcgtgataatcgtggctattactgggatggaggtcactggcgcgaccacggctggtggaaacaacattatgaatggcgaggcaatcgctggcacctacacggaccgccgccaccgccgcgccaccataagaaagctcctcatgatcatcacggcggtcatggtccaggcaaacatcaccgctaaatgacaaatgccgggtaacaatccggcattcagcgcctgatgcgacgctggcgcgtcttatcaggcctacgttaattctgcaatatattgaatctgcatgcttttgtaggcaggataaggcgttcacgccgcatccggcattgactgcaaacttaacgctgctcgtagcgtttaaacaccagttcgccattgctggaggaatcttcatcaaagaagtaaccttcgctattaaaaccagtcagttgctctggtttggtcagccgattttcaataatgaaacgactcatcagaccgcgtgctttcttagcgtagaagctgatgatcttaaatttgccgttcttctcatcgaggaacaccggcttgataatctcggcattcaatttcttcggcttcacgcttttaaaatactcatcactcgccagattaatcaccacattatcgccttgtgctgcgagcgcctcgttcagcttgttggtgatgatatctccccagaattgatacagatctttccctcgggcattctcaagacggatccccatttccagacgataaggctgcattaaatcgagcgggcggagtacgccatacaagccggaaagcattcgcaaatgctgttgggcaaaatcgaaatcgtcttcgctgaaggtttcggcctgcaagccggtgtagacatcacctttaaacgccagaatcgcctggcgggcattcgccggcgtgaaatctggctgccagtcatgaaagcgagcggcgttgatacccgccagtttgtcgctgatgcgcatcagcgtgctaatctgcggaggcgtcagtttccgcgcctcatggatcaactgctgggaattgtctaacagctccggcagcgtatagcgcgtggtggtcaacgggctttggtaatcaagcgttttcgcaggactaataagaatcagcatatccagtccttgcaggaaatttatgccgactttagcaaaaaatgagaatgagttgatcgatagttgtgattactcctggctaacatcatcccacgcgtccggagaaagctggcgaccgatatccggataacgcaatggatcaaacaccgggcgcacgccgagtttacgctggcgtagataatcactggcaatggtatgaaccacagggctgagcagtaaaatggcggtcaaattggtaatagccatgcaggccattatgatatctgccagttgccacatcagcggaaggcttagcaaggtgccgccgatgaccgttgcgaaggtgcagatccgcaaacaccagatcgctttagggttgttcaggcgtaaaaagaagagattgttttcggcataaatgtagttggcaacgatggagctgaaggcaaacagaataaccacaagggtaacaaactcagcaccccaggaacccattagcacccgcatcgccttctggataagctgaataccttccagcggcatgtaggttgtgccgttacccgccagtaatatcagcatggcgcttgccgtacagatgaccagggtgtcgataaaaatgccaatcatctggacaatcccttgcgctgccggatgcggaggccaggacgccgctgccgctgccgcgtttggcgtgctacccattcccgcctcattggaaaacatactgcgctgaaaaccgttagtaatcgcctggcttaaggtatatcccgccgcgccgcctgccgcttcctgccagccaaaagcactctcaaaaatagaccaaatgacgtggggaagttgcccgatattcattacgcaaattaccaggctggtcagtacccagattatcgccatcaacgggacaaagccctgcatgagccgggcgacgccatgaagaccgcgagtgattgccagcagagtaaagacagcgagaataatgcctgtcaccagcgggggaaaatcaaaagaaaaactcagggcgcgggcaacggcgttcgcttgaactccgctgaaaattatgccataggcgatgagcaaaaagacggcgaacagaacgcccatccagcgcatccccagcccgcgcgccatataccatgccggtccgccacgaaactgcccattgacgtcacgttctttataaagttgtgccagagaacattcggcaaagctggtcgccatgccgataaacgcggcaacccacatccaaaagacggctccaggtccaccggcggtaatagccagcgcaacgccggccaggttgccgctacccacgcgcgccgcaagactggtacacaaactctgaaaactggttaaaccgcctggctgtggatgaatgctatttttaagacttttgccaaactggcggatgtagcgaaactgcacaaatccggtgcgaaaagtgaaccaacaacctgcgccgaagagcaggtaaatcattacgcttccccaaaggacgctgttaatgaaggagaaaaaatctggcatgcatatccctcttattgccggccgcgatgactttcctgtgtaaacgttaccaattgtttaagaagtatatacgctacgaggtacttgataacttctgcgtagcatacatgaggttttgtataaaaatggcgggcgatatcaacgcagtgtcagaaatccgaaacagtctcgcctggcgataaccgtcttgtcggcggttgcgctgacgttgcgtcgtgatatcatcagggcagaccggttacatccccctaacaagctgtttaaagagaaatactatcatgacggacaaattgacctcccttcgtcagtacaccaccgtagtggccgacactggggacatcgcggcaatgaagctgtatcaaccgcaggatgccacaaccaacccttctctcattcttaacgcagcgcagattccggaataccgtaagttgattgatgatgctgtcgcctgggcgaaacagcagagcaacgatcgcgcgcagcagatcgtggacgcgaccgacaaactggcagtaaatattggtctggaaatcctgaaactggttccgggccgtatcagtactgaagttgatgcgcgtctttcctatgacaccgaagcgagtattgcgaaagcaaaacgcctgatcaaactctacaacgatgctggtattagcaacgatcgtattctgatcaaactggcttctacctggcagggtatccgtgctgcagaacagctggaaaaagaaggcatcaactgtaacctgaccctgctgttctccttcgctcaggctcgtgcttgtgcggaagcgggcgtgttcctgatcagcccgtttgttggccgtattcttgactggtacaaagcgaataccgataagaaagagtacgctccggcagaagatccgggcgtggtttctgtatctgaaatctaccagtactacaaagagcacggttatgaaaccgtggttatgggcgcaagcttccgtaacatcggcgaaattctggaactggcaggctgcgaccgtctgaccatcgcaccggcactgctgaaagagctggcggagagcgaaggggctatcgaacgtaaactgtcttacaccggcgaagtgaaagcgcgtccggcgcgtatcactgagtccgagttcctgtggcagcacaaccaggatccaatggcagtagataaactggcggaaggtatccgtaagtttgctattgaccaggaaaaactggaaaaaatgatcggcgatctgctgtaatcattcttagcgtgaccgggaagtcggtcacgctacctcttctgaagcctgtctgtcactcccttcgcagtgtatcattctgtttaacgagactgtttaaacggaaaaatcttgatgaatactttacgtattggcttagtttccatctctgatcgcgcatccagcggcgtttatcaggataaaggcatccctgcgctggaagaatggctgacaagcgcgctaaccacgccgtttgaactggaaacccgcttaatccccgatgagcaggcgatcatcgagcaaacgttgtgtgagctggtggatgaaatgagttgccatctggtgctcaccacgggcggaactggcccggcgcgtcgtgacgtaacgcccgatgcgacgctggcagtagcggaccgcgagatgcctggctttggtgaacagatgcgccagatcagcctgcattttgtaccaactgcgatccttagccgtcaggtgggcgtgattcgcaaacaggcgctgatccttaacttacccggtcagccgaagtctattaaagagacgctggaaggtgtgaaggacgctgagggtaacgttgtggtacacggtatttttgccagcgtaccgtactgcattcagttgctggaagggccatacgttgaaacggcaccggaagtggttgcagcattcagaccgaagagtgcaagacgcgacgttagcgaataaaaaaatccccccgagcggggggatctcaaaacaattagtgggattcaccaatcggcagaacggtgcgaccaaactgctcgttcagtacttcacccatcgccagatagattgcgctggcaccgcagatcagcccaatccagccggcaaagtggatgattgcggcgttaccggcaatgttaccgatcgccagcagggcaaacagcacggtcaggctaaagaaaacgaattgcagaacgcgtgcgcctttcagcgtgccgaagaacataaacagcgtaaatacgccccacagacccaggtagacaccaaggaactgtgcatttggcgcatcggtcagacccagtttcggcatcagcagaatcgcaaccagcgtcagccagaaagaaccgtaagaggtgaatgcggttaaaccgaaagtgttgccttttttgtactccagcagaccagcaaaaatttgcgcgatgccgccgtagaaaatgcccatggcaagaataatgccgtccagagcgaaataacccacgttgtgcaggttaagcagaatggtggtcatgccgaagcccatcaggcccagcggtgccggattagccaacttagtgttgcccataattcctcaaaaatcatcatcgaatgaatggtgaaataatttccctgaataactgtagtgttttcagggcgcggcataataatcagccagtggggcagtgtctacgatcttttgaggggaaaatgaaaattttccccggtttccggtatcagacctgagtggcgctaaccatccggcgcaggcaggcgatttgcagtacggctggaatcgtcacgcgataggcgctgccgctgaccgctttaaccccatttagtgccgcacctacagggccttccagccccgcgccgcgcagcaaaccatgcccaagtacgctcattgctgcgtgggtgcgtaaaatgcgggtcagttggctggaaagcaaatggctcacaccttttgccaataatttgtctttcatcagcagcggcagcagctcttccagctcattcaccctggcatcgaccgcgtgcagaaactcctgcttatgttcctcgtccattttcttccaggtattacgcagaaattgttccagtaactgttgctcaatttcaaacgtagacatctctttgtcggctttcagcttcaatcgcttactaacatcgagcaaaatggcccgatacaatttaccgtgtccgcgcagtttgttggcgatactatcgccaccaaaatgctgtaattctccggcaatcagctgccagttgcggcgatgttgctcgggatgcccttccatgcttttaaacagttcgttgcgcatcagtacgctggagaggcgagttttgcctttttcattatgggtgagcaatcgggcgaaatttgccaactgttcctcactacaatgctgaagaaaatccagatcactatcattcaggtaattaacattcattttttgtggcttctatattctggcgttagtcgtcgccgataattttcagcgtggccatatcgctactgttcaccgtatgaccgctaaaggtgattttactgacgcagcgtttattgtcgttatcgctgttaatgttgatccagtcagtggtttgcccttcttttatttcactaggaatattcaggctctgactggcgctacgggcggctttgaaataaacgcttgcaccgcttaactgtaaatcgccatggtcggcagagagttgtatgcgtttcacaatgcgacaaacaggaagtttcagcgccagatcgttggtttcgttacgcggcattgcaatggcgccgaggagtttatggtcgtttgcctgcgccgtgcagcacagcatcaggctaatcgccaggctggcggaaatcgtaaaaacggatttcataaggattctcttagtgggaagaggtagggggatgaatacccactagtttactgctgataaagagaagattcaggcacgtaatcttttctttttattacaattttttgatgaatgccttggctgcgattcattctttatatgaataaaattgctgtcaattttacgtcttgtcctgccatatcgcgaaatttctgcgcaaaagcacaaaaaatttttgcatctcccccttgatgacgtggtttacgaccccatttagtagtcaaccgcagtgagtgagtctgcaaaaaaatgaaattgggcagttgaaaccagacgtttcgcccctattacagactcacaaccacatgatgaccgaatatatagtggagacgtttagatgggtaaaataattggtatcgacctgggtactaccaactcttgtgtagcgattatggatggcaccactcctcgcgtgctggagaacgccgaaggcgatcgcaccacgccttctatcattgcctatacccaggatggtgaaactctagttggtcagccggctaaacgtcaggcagtgacgaacccgcaaaacactctgtttgcgattaaacgcctgattggtcgccgcttccaggacgaagaagtacagcgtgatgtttccatcatgccgttcaaaattattgctgctgataacggcgacgcatgggtcgaagttaaaggccagaaaatggcaccgccgcagatttctgctgaagtgctgaaaaaaatgaagaaaaccgctgaagattacctgggtgaaccggtaactgaagctgttatcaccgtaccggcatactttaacgatgctcagcgtcaggcaaccaaagacgcaggccgtatcgctggtctggaagtaaaacgtatcatcaacgaaccgaccgcagctgcgctggcttacggtctggacaaaggcactggcaaccgtactatcgcggtttatgacctgggtggtggtactttcgatatttctattatcgaaatcgacgaagttgacggcgaaaaaaccttcgaagttctggcaaccaacggtgatacccacctggggggtgaagacttcgacagccgtctgatcaactatctggttgaagaattcaagaaagatcagggcattgacctgcgcaacgatccgctggcaatgcagcgcctgaaagaagcggcagaaaaagcgaaaatcgaactgtcttccgctcagcagaccgacgttaacctgccatacatcactgcagacgcgaccggtccgaaacacatgaacatcaaagtgactcgtgcgaaactggaaagcctggttgaagatctggtaaaccgttccattgagccgctgaaagttgcactgcaggacgctggcctgtccgtatctgatatcgacgacgttatcctcgttggtggtcagactcgtatgccaatggttcagaagaaagttgctgagttctttggtaaagagccgcgtaaagacgttaacccggacgaagctgtagcaatcggtgctgctgttcagggtggtgttctgactggtgacgtaaaagacgtactgctgctggacgttaccccgctgtctctgggtatcgaaaccatgggcggtgtgatgacgacgctgatcgcgaaaaacaccactatcccgaccaagcacagccaggtgttctctaccgctgaagacaaccagtctgcggtaaccatccatgtgctgcagggtgaacgtaaacgtgcggctgataacaaatctctgggtcagttcaacctagatggtatcaacccggcaccgcgcggcatgccgcagatcgaagttaccttcgatatcgatgctgacggtatcctgcacgtttccgcgaaagataaaaacagcggtaaagagcagaagatcaccatcaaggcttcttctggtctgaacgaagatgaaatccagaaaatggtacgcgacgcagaagctaacgccgaagctgaccgtaagtttgaagagctggtacagactcgcaaccagggcgaccatctgctgcacagcacccgtaagcaggttgaagaagcaggcgacaaactgccggctgacgacaaaactgctatcgagtctgcgctgactgcactggaaactgctctgaaaggtgaagacaaagccgctatcgaagcgaaaatgcaggaactggcacaggtttcccagaaactgatggaaatcgcccagcagcaacatgcccagcagcagactgccggtgctgatgcttctgcaaacaacgcgaaagatgacgatgttgtcgacgctgaatttgaagaagtcaaagacaaaaaataatcgccctataaacgggtaattatactgacacgggcgaaggggaatttcctctccgcccgtgcattcatctaggggcaatttaaaaaagatggctaagcaagattattacgagattttaggcgtttccaaaacagcggaagagcgtgaaatcagaaaggcctacaaacgcctggccatgaaataccacccggaccgtaaccagggtgacaaagaggccgaggcgaaatttaaagagatcaaggaagcttatgaagttctgaccgacagccaaaaacgtgcggcatacgatcagtatggtcatgctgcgtttgagcaaggtggcatgggcggcggcggttttggcggcggcgcagacttcagcgatatttttggtgacgttttcggcgatatttttggcggcggacgtggtcgtcaacgtgcggcgcgcggtgctgatttacgctataacatggagctcaccctcgaagaagctgtacgtggcgtgaccaaagagatccgcattccgactctggaagagtgtgacgtttgccacggtagcggtgcaaaaccaggtacacagccgcagacttgtccgacctgtcatggttctggtcaggtgcagatgcgccagggattcttcgctgtacagcagacctgtccacactgtcagggccgcggtacgctgatcaaagatccgtgcaacaaatgtcatggtcatggtcgtgttgagcgcagcaaaacgctgtccgttaaaatcccggcaggggtggacactggagaccgcatccgtcttgcgggcgaaggtgaagcgggcgagcatggcgcaccggcaggcgatctgtacgttcaggttcaggttaaacagcacccgattttcgagcgtgaaggcaacaacctgtattgcgaagtcccgatcaacttcgctatggcggcgctgggtggcgaaatcgaagtaccgacccttgatggtcgcgtcaaactgaaagtgcctggcgaaacccagaccggtaagctattccgtatgcgcggtaaaggcgtcaagtctgtccgcggtggcgcacagggtgatttgctgtgccgcgttgtcgtcgaaacaccggtaggcctgaacgaaaggcagaaacagctgctgcaagagctgcaagaaagcttcggtggcccaaccggcgagcacaacagcccgcgcagtaagagcttctttgatggtgtgaagaagttttttgacgacctgacccgctaacctccccaaaagcctgcccgtgggcaggcctgggtaaaaatagggtgcgttgaagatatgcgagcacctgtaaagtggcggggatcactctacctcaatgtgtatcacaatatccatattctttgtgggggagtctggagattgagtagatattcttgttcagaatgtatcagccgatggttctacgattcttaagccacgaagagttcagatagtacaacggcatgtctcttttgactatctggcaaccggcagtgtgttctctcacgcatcacaaaagcagcaggcataaaaaaacccgcttgcgcgggctttttcacaaagcttcagcaaattggcgattaagccagtttgttgatctgtgcagtcaggttagccttatgacgtgcagctttgtttttgtggatcagacctttagcagcctgacggtccacgatcggttgcatttcgttaaatgctttctgtgcagcagctttgtcgccagcttcgatagctgcgtatactttcttgatgaaagtacgcatcatagagcgacggcttgcgttgtgcttacgagccttttcagactgaatggcgcgcttcttagcacttttgatattagccaaggtccaactcccaaatgtgttctatatggacaattcaaaggccgaggaatatgcccttttagccttcttttgtcaatggatttgtgcaaataagcgccgttaatgtgccggcacagcttacgtagtgatggcgcaggattctaccagcttgcggggtgtgaatacagcttttccgcgataaaaattgcagcaggcggtcagtttcttcccgtgatttgcgccatggcaatgaaaagccacttctttctgattagcgtactcaatcgccggttaaccttgaccgctgtacaaggtatactcggacgatttagcctgttttgagccagacatgaagctgatacgcggcatacataatctcagccaggccccgcaagaagggtgtgtgctgactattggtaatttcgacggcgtgcatcgcggtcatcgcgcgctgttacagggcttgcaggaagaagggcgcaagcgcaacttaccggtgatggtgatgctttttgaacctcaaccactggaactgtttgctaccgataaagccccggcaagactgacccggctgcgggaaaaactgcgttaccttgcagagtgtggcgttgattacgtgctgtgcgtgcgtttcgacaggcgtttcgcggcgttaaccgcgcaaaatttcatcagcgatcttctggtgaagcatttgcgcgtaaaatttcttgccgtaggtgatgatttccgctttggcgctggtcgtgaaggcgatttcttgttattacagaaagctggcatggaatacggcttcgatatcaccagtacgcaaactttttgcgaaggtggcgtgcgcatcagcagcaccgccgtgcgtcaggcccttgcggatgacaatctggctctggcagagagtttactggggcacccgtttgccatctccgggcgtgtagtccacggtgatgaattagggcgcactataggtttcccgacggcgaatgtaccgctgcgccgtcaggtttccccggtgaaaggggtttatgcggtagaagtgctgggcctcggtgaaaagccgttacccggcgtggcaaacatcggaacacgcccaacggttgccggtattcgccagcagctggaagtgcatttgttagatgttgcaatggacctttacggtcgccatatacaagtagtgctgcgtaaaaaaatacgcaatgagcagcgatttgcgagcctggacgaactgaaagcgcagattgcgcgtgatgaattaaccgcccgcgaattttttgggctaacaaaaccggcttaagcctgttatgtaatcaaaccgaaatacggaaccgagaatctgatgagtgactataaaagtaccctgaatttgccggaaacagggttcccgatgcgtggcgatctcgccaagcgcgaacccggaatgctggcgcgttggactgatgatgatctgtacggcatcatccgtgcggctaaaaaaggcaaaaaaaccttcattctgcatgatggccctccttatgcgaatggcagcattcatattggtcacagcgttaacaagattctgaaagacattatcgtgaagtccaaagggctttccggttatgacagcccgtatgtgcctggctgggactgccacggtctgccgatcgagctgaaagtcgagcaagaatacggtaagccgggtgagaaattcaccgccgccgagttccgcgccaagtgccgcgaatacgcggcgacccaggttgacggtcaacgcaaagactttatccgtctgggcgtgctgggcgactggagccacccgtacctgaccatggacttcaaaactgaagccaacatcatccgcgcgctgggcaaaatcatcggcaacggtcacctgcacaaaggcgcgaagccagttcactggtgcgttgactgccgttctgcgctggcggaagcggaagttgagtattacgacaaaacttctccgtccatcgacgttgctttccaggcagtcgatcaggatgcactgaaagcaaaatttgccgtaagcaacgttaacggcccaatcagcctggtaatctggaccaccacgccgtggactctgcctgccaaccgcgcaatctctattgcaccagatttcgactatgcgctggtgcagatcgacggtcaggccgtgattctggcgaaagatctggttgaaagcgtaatgcagcgtatcggcgtgaccgattacaccattctcggcacggtaaaaggtgcggagcttgagctgctgcgctttacccatccgtttatgggcttcgacgttccggcaatcctcggcgatcacgttaccctggatgccggtaccggtgccgttcacaccgcgcctggccacggcccggacgactatgtgatcggtcagaaatacggcctggaaaccgctaacccggttggcccggacggcacttatctgccgggcacttatccgacgctggatggcgtgaacgtcttcaaagcgaacgacatcgtcgttgcgctgctgcaggaaaaaggcgcgctgctgcacgttgagaaaatgcagcacagctatccgtgctgctggcgtcacaaaacgccgatcatcttccgcgcgacgccgcagtggttcgtcagcatggatcagaaaggtctgcgtgcgcagagtctgaaagagatcaaaggcgtgcagtggatcccggactggggccaggcgcgtatcgagagcatggttgctaaccgtcctgactggtgtatctcccgtcagcgcacctggggtgtaccgatgagtctgttcgtgcacaaagacacggaagagctgcatccgcgtacccttgaactgatggaagaagtggcaaaacgcgttgaagtcgatggcatccaggcgtggtgggatctcgatgcgaaagagatcctcggcgacgaagctgatcagtacgtgaaagtgccggacacattggatgtatggtttgactccggatctacccactcttctgttgttgacgtgcgtccggaatttgccggtcacgcagcggacatgtatctggaaggttctgaccaacaccgcggctggttcatgtcttccctaatgatctccaccgcgatgaagggtaaagcgccgtatcgtcaggtactgacccacggctttaccgtggatggtcagggccgcaagatgtctaaatccatcggcaataccgttagcccgcaggatgtgatgaacaaactgggcgcggatattctgcgtctgtgggtggcaagtaccgactacaccggtgaaatggccgtttctgacgagatcctgaaacgtgctgccgatagctatcgtcgtatccgtaacaccgcgcgcttcctgctggcaaacctgaacggttttgatccagcaaaagatatggtgaaaccggaagagatggtggtactggatcgctgggccgtaggttgtgcgaaagcggcacaggaagacatcctcaaggcgtacgaagcatacgatttccacgaagtggtacagcgtctgatgcgcttctgctccgttgagatgggttccttctacctcgacatcatcaaagaccgtcagtacaccgccaaagcggacagtgtggcgcgtcgtagctgccagactgcgctatatcacatcgcagaagcgctggtgcgctggatggcaccaatcctctccttcaccgctgatgaagtgtggggctacctgccgggcgaacgtgaaaaatacgtcttcaccggtgagtggtacgaaggcctgtttggcctggcagacagtgaagcgatgaacgatgcgttctgggacgagctgttgaaagtgcgtggcgaagtgaacaaagtcattgagcaagcgcgtgccgacaagaaagtgggtggcagcctggaagcggcagtaaccttgtatgcagaaccggaactgagcgcgaaactgaccgcgctgggcgatgaattacgatttgtcctgttgacctccggcgctaccgttgcagactataacgacgcacctgctgatgctcagcagagcgaagtactcaaagggctgaaagtcgcgttgagtaaagccgaaggtgagaagtgcccacgctgctggcactacacccaggatgtcggcaaggtggcggaacacgcagaaatctgcggccgctgtgtcagcaacgtcgccggtgacggtgaaaaacgtaagtttgcctgatgagtcaaagcatctgtagtacagggctacgctggctgtggctggtggtagtcgtgctgattatcgatctgggcagcaaatacctgatcctccagaactttgctctgggggatacggtcccgctgttcccgagccttaatctgcattatgcgcgtaactatggcgcggcgtttagtttccttgccgatagcggcggctggcagcgttggttctttgccggtattgcgattggtattagcgtgatcctggcagtgatgatgtatcgcagcaaggccacgcagaagctaaacaatatcgcttacgcgctgattattggcggcgcgctgggcaacctgttcgaccgcctgtggcacggcttcgttgtcgatatgatcgacttctacgtcggcgactggcacttcgccaccttcaaccttgccgatactgccatctgtgtcggtgcggcactgattgtgctggaaggttttttgccttctagagcgaaaaaacaataataaaccctgccggatgcgatgctgacgcatcttatccggcctacagattgctgcgaaatcgtaggccggataaggcgtttacgccgcatccggcaaaaatccttaaatataagagcaaacctgcatgtctgaatctgtacagagcaatagcgccgtcctggtgcacttcacgctaaaactcgacgatggcaccaccgccgagtctacccgcaacaacggtaaaccggcgctgttccgcctgggtgatgcttctctttctgaagggctggagcaacacctgttggggctgaaagtgggcgataaaaccaccttcagcttggagccagatgcggcgtttggcgtgccgagtccggacctgattcagtacttctcccgccgtgaatttatggatgcaggcgagccagaaattggcgcaatcatgctttttaccgcaatggatggcagtgagatgcctggcgtgatccgcgaaattaacggcgactccattaccgttgatttcaaccatccgctggccgggcagaccgttcattttgatattgaagtgctggaaatcgatccggcactggaggcgtaacatgcagatcctgttggccaacccgcgtggtttttgtgccggggtagaccgcgctatcagcattgttgaaaacgcgctggccatttacggcgcaccgatatatgtccgtcacgaagtggtacataaccgctatgtggtcgatagcttgcgtgagcgtggggctatctttattgagcagattagcgaagtaccggacggcgcgatcctgattttctccgcacacggtgtttctcaggcggtacgtaacgaagcaaaaagtcgcgatttgacggtgtttgatgccacctgtccgctggtgaccaaagtgcatatggaagtcgcccgcgccagtcgccgtggcgaagaatctattctcatcggtcacgccgggcacccggaagtggaagggacaatgggccagtacagtaacccggaagggggaatgtatctggtcgaaagcccggacgatgtgtggaaactgacggtcaaaaacgaagagaagctctcctttatgacccagaccacgctgagcgtggatgacacgtctgatgtgatcgacgcgctgcgtaaacgcttcccgaaaattgtcggtccgcgcaaagatgacatctgctacgccacgactaaccgtcaggaagcggtacgcgccctggcagaacaggcggaagttgtgttggtggtcggtagcaaaaactcctccaactccaaccgtctggcggagctggcccagcgtatgggcaaacgcgcgtttttgattgacgatgcgaaagacatccaggaagagtgggtgaaagaggttaaatgcgtcggcgtgactgcgggcgcaagcgctccggatattctggtgcagaatgtggtggcgcgtttgcagcagctgggcggtggtgaagccattccgctggaaggccgtgaagaaaacattgttttcgaagtgccgaaagagctgcgtgtcgatattcgtgaagtcgattaagtcattagcagcctaagttatgcgaaaatgccggtcttgttaccggcattttttatggagaaaacatgcgtttacctatcttcctcgatactgaccccggcattgacgatgccgtcgccattgccgccgcgatttttgcacccgaactcgacctgcaactgatgaccaccgtcgcgggtaatgtcagcgttgagaaaactacccgcaatgccctgcaactgctgcatttctggaatgcggagattccgctcgcccaaggggccgctgtgccactggtacgcgcaccgcgtgatgcggcatctgtgcacggcgaaagcggaatggctggctacgactttgttgagcacaaccgaaagccgctcgggataccggcgtttctggcgattcgggatgccctgatgcgtgcaccagagcctgttaccctggtggccatcggcccgttaaccaatattgcgctgttacttagtcaatgcccggaatgcaagccgtatattcgccgtctggtgatcatgggtggttctgccggacgcggcaactgtacgccaaacgccgagtttaatattgctgccgatccagaagctgctgcctgtgtcttccgcagtggtattgaaatcgtcatgtgcggtttggatgtcaccaatcaggcaatattaactcctgactatctctctacactgccgcagttaaaccgtaccgggaaaatgcttcacgccctgtttagccactaccgtagcggcagtatgcaaagcggcttgcgaatgcacgatctctgcgccatcgcctggctggtgcgcccggacctgttcactctcaaaccctgttttgtggcagtggaaactcagggcgaatttaccagtggcacgacggtggttgatatcgacggttgcctgggcaagccagccaatgtacaggtggcattggatctggatgtgaaaggcttccagcagtgggtggctgaggtgctggctctggcgagctaacctgtcacatgttattggcatgcagtcattcatcgactcatgcctttcactgatatccctccctgtttatcattaatttctaattatcagcgtttttggctggcggcgtagcgatgcgctggttactctgaaaacggtctatgcaaattaacaaaagagaatagctatgcatgatgcaaacatccgcgttgccatcgcgggagccggggggcgtatgggccgccagttgattcaggcggcgctggcattagagggcgtgcagttgggcgctgcgctggagcgtgaaggatcttctttactgggcagcgacgccggtgagctggccggagccgggaaaacaggcgttaccgtgcaaagcagcctcgatgcggtaaaagatgattttgatgtgtttatcgattttacccgtccggaaggtacgctgaaccatctcgctttttgtcgccagcatggcaaagggatggtgatcggcactacggggtttgacgaagccggtaaacaagcaattcgtgacgccgctgccgatattgcgattgtctttgctgccaattttagcgttggcgttaacgtcatgcttaagctgctggagaaagcagccaaagtgatgggtgactacaccgatatcgaaattattgaagcacatcatagacataaagttgatgcgccgagtggcaccgcactggcaatgggagaggcgatcgcccacgcccttgataaagatctgaaagattgcgcggtctacagtcgtgaaggccacaccggtgaacgtgtgcctggcaccattggttttgccaccgtgcgtgcaggtgacatcgttggtgaacataccgcgatgtttgccgatattggcgagcgtctggagatcacccataaggcgtccagccgtatgacatttgctaacggcgcggtaagaagcgctttgtggttgagtggtaaggaaagcggtctttttgatatgcgagatgtacttgatctcaataatttgtaaccacaaaatatttgttatggtgcaaaaataacacatttaatttattgattataaagggctttaatttttggcccttttatttttggtgttatgtttttaaattgtctataagtgccaaaaattacatgttttgtcttctgtttttgttgttttaatgtaaattttgaccatttggtccacttttttctgctcgtttttatttcatgcaatcttcttgctgcgcaagcgttttccagaacaggttagatgatctttttgtcgcttaatgcctgtaaaacatgcatgagccacaaaataatataaaaaatcccgccattaagttgacttttagcgcccatatctccagaatgccgccgtttgccagaaattcgtcggtaagcagatttgcattgatttacgtcatcattgtgaattaatatgcaaataaagtgagtgaatattctctggagggtgttttgattaagagtgcgctattggttctggaagacggaacccagtttcacggtcgggccataggggcaacaggtagcgcggttggggaagtcgttttcaatactagtatgaccggttatcaagaaatcctcactgatccttcctattctcgtcaaatcgttactcttacttatccccatattggcaatgtcggcaccaatgacgccgatgaagaatcttctcaggtacatgcacaaggtctggtgattcgcgacctgccgctgattgccagcaacttccgtaataccgaagacctctcttcttacctgaaacgccataacatcgtggcgattgccgatatcgatacccgtaagctgacgcgtttactgcgcgagaaaggcgcacagaatggctgcattatcgcgggcgataacccggatgcggcgctggcgttagaaaaagcccgcgcgttcccaggtctgaatggcatggatctggcaaaagaagtgaccaccgcagaagcctatagctggacacaagggagctggacgttgaccggtggcctgccagaagcgaaaaaagaagacgagctgccgttccacgtcgtggcttatgattttggtgccaagcgcaacatcctgcggatgctggtggatagaggctgtcgcctgaccatcgttccggcgcaaacttctgcggaagatgtgctgaaaatgaatccagacggcatcttcctctccaacggtcctggcgacccggccccgtgcgattacgccattaccgccatccagaaattcctcgaaaccgatattccggtattcggcatctgtctcggtcatcagctgctggcgctggcgagcggtgcgaagactgtcaaaatgaaatttggtcaccacggcggcaaccatccggttaaagatgtggagaaaaacgtggtaatgatcaccgcccagaaccacggttttgcggtggacgaagcaacattacctgcaaacctgcgtgtcacgcataaatccctgttcgacggtacgttacagggcattcatcgcaccgataaaccggcattcagcttccaggggcaccctgaagccagccctggtccacacgacgccgcgccgttgttcgaccactttatcgagttaattgagcagtaccgtaaaaccgctaagtaatcaggagtaaaagagccatgccaaaacgtacagatataaaaagtatcctgattctgggtgcgggcccgattgttatcggtcaggcgtgtgagtttgactactctggcgcgcaagcgtgtaaagccctgcgtgaagagggttaccgcgtcattctggtgaactccaacccggcgaccatcatgaccgacccggaaatggctgatgcaacctacatcgagccgattcactgggaagttgtacgcaagattattgaaaaagagcgcccggacgcggtgctgccaacgatgggcggtcagacggcgctgaactgcgcgctggagctggaacgtcagggcgtgttggaagagttcggtgtcaccatgattggtgccactgccgatgcgattgataaagcagaagaccgccgtcgtttcgacgtagcgatgaagaaaattggtctggaaaccgcgcgttccggtatcgcacacacgatggaagaagcgctggcggttgccgctgacgtgggcttcccgtgcattattcgcccatcctttaccatgggcggtagcggcggcggtatcgcttataaccgtgaagagtttgaagaaatttgcgcccgcggtctggatctctctccgaccaaagagttgctgattgatgagagcctgatcggctggaaagagtacgagatggaagtggtgcgtgataaaaacgacaactgcatcatcgtctgctctatcgaaaacttcgatgcgatgggcatccacaccggtgactccatcactgtcgcgccagcccaaacgctgaccgacaaagaatatcaaatcatgcgtaacgccagcatggcggtgctgcgtgaaatcggcgttgaaaccggtggttccaacgttcagtttgcggtgaacccgaaaaacggtcgtctgattgttatcgaaatgaacccacgcgtgtcccgttctagcgcgctggcgagcaaagcgaccggtttcccgattgctaaagtggcggcgaaactggcggtgggttacaccctcgacgaactgatgaacgacatcactggcggacgtactccggcctccttcgagccgtccatcgactatgtggttactaaaattcctcgcttcaacttcgaaaaattcgccggtgctaacgaccgtctgaccactcagatgaaaagcgttggcgaagtgatggcgattggtcgcacgcagcaggaatccctgcaaaaagcgctgcgcggcctggaagtcggtgcgactggattcgacccgaaagtgagcctggatgacccggaagcgttaaccaaaatccgtcgcgaactgaaagacgcaggcgcagatcgtatctggtacatcgccgatgcgttccgtgcgggcctgtctgtggacggcgtcttcaacctgaccaacattgaccgctggttcctggtacagattgaagagctggtgcgtctggaagagaaagtggcggaagtgggcatcactggcctgaacgctgacttcctgcgccagctgaaacgcaaaggctttgccgatgcgcgcttggcaaaactggcgggcgtacgcgaagcggaaatccgtaagctgcgtgaccagtatgacctgcacccggtttataagcgcgtggatacctgtgcggcagagttcgccaccgacaccgcttacatgtactccacttatgaagaagagtgcgaagcgaatccgtctaccgaccgtgaaaaaatcatggtgcttggcggcggcccgaaccgtatcggtcagggtatcgaattcgactactgttgcgtacacgccagcctggcgctgcgcgaagacggttacgaaaccattatggttaactgtaacccggaaaccgtctccaccgactacgacacttccgaccgcctctacttcgagccggtaactctggaagatgtgctggaaatcgtgcgtatcgagaagccgaaaggcgttatcgtccagtacggcggtcagaccccgctgaaactggcgcgcgcgctggaagctgctggcgtaccggttatcggcaccagcccggatgctatcgaccgtgcagaagaccgtgaacgcttccagcatgcggttgagcgtctgaaactgaaacaaccggcgaacgccaccgttaccgctattgaaatggcggtagagaaggcgaaagagattggctacccgctggtggtacgtccgtcttacgttctcggcggtcgggcgatggaaatcgtctatgacgaagctgacctgcgtcgctacttccagacggcggtcagcgtgtctaacgatgcgccagtgttgctggaccacttcctcgatgacgcggtagaagttgacgtggatgccatctgcgacggcgaaatggtgctgattggcggcatcatggaacatattgagcaggcgggcgtgcactccggtgactccgcatgttctctgccagcctacaccttaagtcaggaaattcaggatgtgatgcgccagcaggtgcagaaactggccttcgaattgcaggtgcgcggcctgatgaacgtgcagtttgcggtgaaaaacaacgaagtctacctgattgaagttaacccgcgtgcggcgcgtaccgttccgttcgtctccaaagccaccggcgtaccgctggcaaaagtggcggcgcgcgtgatggctggcaaaagcctggctgagcagggcgtaaccaaagaagttatcccgccgtactacagcgtgaaagaagtggtgctgccgttcaataaattcccgggcgttgacccgctgttagggccagaaatgcgctctaccggggaagtcatgggcgtgggccgcaccttcgctgaagcgtttgccaaagcgcagctgggcagcaactccaccatgaagaaacacggtcgtgcgctgctttccgtgcgcgaaggcgataaagaacgcgtggtggacctggcggcaaaactgctgaaacagggcttcgagctggatgcgacccacggcacggcgattgtgctgggcgaagcaggtatcaacccgcgtctggtaaacaaggtgcatgaaggccgtccgcacattcaggaccgtatcaagaatggcgaatatacctacatcatcaacaccaccagtggccgtcgtgcgattgaagactcccgcgtgattcgtcgcagtgcgctgcaatataaagtgcattacgacaccaccctgaacggcggctttgccaccgcgatggcgctgaatgccgatgcgactgaaaaagtaattagcgtgcaggaaatgcacgcacagatcaaataatagcgtgtcatggcagatatttttcatccgctaatttgatcgaataactaatacggttctctgatgaggaccgtttttttttgcccattaagtaaatcttttggggaatcgatatttttgatgacataagcaggatttagctcacacttatcgacggtgaagttgcatactatcgatatatccacaattttaatatggccttgtttaattgcttcaaaacgagtcatagccagacttttaatttgtgaaactggagttcgtatgtgtgaaggatatgttgaaaaaccactctacttgttaatcgccgaatggatgatggctgaaaatcggtgggtgatagcaagagagatctctattcatttcgatattgaacacagcaaggcggttaataccctgacttatattctgagcgaagtcacagaaataagctgcgaagttaagatgatccctaataagctggaagggcggggatgccagtgtcagcgactggttaaagtggtcgatatcgatgagcaaatttacgcgcgcctgcgcaataacagtcgggaaaaattagtcggtgtaagaaagacgccgcgtattcctgccgttccgctcacggaacttaaccgcgagcagaagtggcagatgatgttgagtaagagtatgcgtcgttaattttatctcgttgataccgggcgtcctgcttgccagatgcgatgttgtagcatcttatccagcaaccaggtcgcatccggcaagatcaccgtttaggcgtcacatccgtcgtcccctgcaaacgggggcgattttcctccatttgcctcagtggctgcgtttcatgtaagcttacatgacagcgcccgacaagatcctgatactctttggtattcaaccgtttccagtgtaactcgtcgtcactaacattgcgtacagcgcgggctggcgtacccatcaacaactggcgtttctcgccgcgaaagcccgctttgacaaagctcatggcggcaacaatgctctcttcgccaatgaccgcgccatccataatcacgctgttcatcccgaccaatgcatcgcgaccaatcaaacaaccatgcaggatcgctccgtgcccgatatggccgttttccccaacgatagtgtcagtgtcgcagtagccatgcataatgcagccatcctgaatattggctcccgcttgcacgatcaaccgcccgtagtcaccacgcagactggcgagtgggccgatgtagacaccggctcccacaatcacatcgccaatcaagacggcactgggatggacaaacgccgtcgggtgaaccaccggaattaacccctcaaaggcgtaatagctcacggttgttaacgtcctttccacaccggatcgcgcttctcggcaaacgccagcggcccttcaatggcatcttcgctatgcagaacgcttggatagtgtttcaacacgccgctgcgaatatagcgatacgcttcttctaccggcatttcgctggtggtgcggtagatctctttcagcgccgcaatcgccagcggggcgctgttaaccagctgctgagccagttcgcgggcgttatccatcagttccgcctggctaaccacgcggttgactatcccccaacgcagcgcctcttctgcgcccattcgtctgccggtcatcaccatttcattgacgatggcaggcggcaggatcttcggcagacgcagcacaccgccgctgtcaggaacgatgcccagtttggcttccggcagggcgaagctggcgttatcggcacaaacaataaaatctgccgccagcgccagttcaaagccgccgccaaaggcatagccgttcacagctgcgataaccggtttgtcgagattgaaaatttcggttaatcccgcaaaaccacccggaccaaagtcagcatccggtgcttcgccttctgctgccgcttttaaatcccagcccgcggaaaagaacttctctccggcaccggtaataatggcgacacgtaattgcggatcgtcacggaaatttagaaatacttcgcccatttcaaagctggtttttgcatcaatagcattcgcttttggacgatcaagggtaatttccagaatacttccattgcgggtcagatgtaaactttcactcattccttttctccatttttgctttttcagggagctcaacatccctgcaaaaaatgcatattgttttagagtgtgattattagctggcagggtagttccctgctgtttcatttatttcagattctttctaattattttcccgctgcaattacgtggcagatcttttctgatctccagataagagggcactttaaatttcgccatattttgttcgcagaagcggaaaaattcctcttcgctcaatgtttcaccttcattcagcaccacaaatgctttgatggcttcatcgcgaatgctatctttaatacccacaaccacgatgtcctgaattttcgggtgcgcggcgataatattttccagctccacgcaggagacattctcgccgccacgtttaatcatattgcagcggcgatcgacgaaataaaaaaagtcctcttcgtcgcggtatccggtatcgccggtatgcagccagccatcggcttccagcactttcgcagtggcttgtgggttgagaaagtactctttgaagatggttttcccaggtatgcctttaatgcagatttcaccgatctcaccagccgggagcgggcgattgtgatcgtcgcggatctccgcttcgtagcaaaaccccacccgaccaatgctcggccagcgtcgtttatcgccaggacgatcgccgataatgcccacaatggtttccgtcatcccataagacgtcagcaagcgaacgccgaagcgttcacaaaacgcatctttttcctgctcgctcaagttgagataaaacatcacttcccgcaggcggtgttgctgatcgttcgcactaggcggctgtaccatcaacgtacggatcatcatcggaatacattcggtaacggtggcgcggtacttctgtacctgtccccagaaggcgcgggcgctgtatttctcgaccagcacaaaggtggccccggcagaaaacgccgccatcgccgcagtacactggcaatcgatatgaaacgcaggcattaccgtcaggtagacgtcatcgtcacgcagtgcacactgccaggcggagtaatatccagcgaagcgcaggttgtaatgggtaatcaccacacctttcggtcgggaggtggtgccggaggtgaagagaatttccgccgtatcgtcagtgcttagcggcggtgcatagcacaaggtggcaggttgttgatttttcagttgagtaaagctactcacgccatcatcagcgggaagtgccacatctgtcaggcaaatgtgccgcaattgagtggcatcttcctgctgaatctgttgatacataggatagaattgcgcactggtcaccagcaggcacgcctggctattttgcaggatccacgcgctttccttgcacaacaggcgggcgttaatcggcaccataatcgcgccaatttttgccagcccgaaccagcaaaagataaattccgggcagttgtcgagatgtagtgcaaccttgtcgcctttgcgaatccccagcgtataaaacaggtttgccgtgcggttaatctcctgatttaactcaagataactataccggttaacgactccgccgctggattcacaaatcagcgccgttttatgaccgtaaacgtccgcaagatcgtcccacatttgacgtagatgttgtccgccaatgatatccattgcacctctatccatttttgttcgtttgttattgggcgggcgctagtcaggcaagccgactgacgccacgcgtttagtcctcaactttggccagacctttgctgaccaactcctgaatgtcgttttcgctgtagccgatatttttcaaaatggcagccgtgtccataccatgactgggcattccgcgccagatttgtccggggttatttttgaatttcggcatgatgttcggccctttgcaggtgcgaccatccatcgtttgccactgagtgatactttcgcgagccacatactgtggattgctttccagttccggtacggtcagcactttggcgcaggcgatattcagttcagcaaagcgttcttttacttccgcgatggtatgtgtcgccagccaggcatcgagtttctcttcaaccagtgggccgtaagggcattcgatacggtggataagctgagtgccttccgggatttctggcgtgccaagcagatgtgcgaggccaatatctttaaagcactcttcaatttgggtaatgcccaccagttccatcacgatgtagccgtcggcacatttatacagaccgcaaccggcgtagtagggatctttacctttgctcatgcgcgggcacatttcgccgccgttgaagtaatccatcatgaagtactggcccatacgcagcatcacttcatacatggcgatgtcgatactttcgcctttaccggtttcacgcactttatgcagtgctgccagcgccgccgtggtggcggtcaggccagaaaagtaatcggcggtatacgggaaggcaggcattggctggtcaacatcaccgttctgaatcaggtaaccactaaaggcctgggcgatagtgttataggccggaagattggtgtactcctcggtgccgtactgaccaaaaccggacaggtgagcgataaccagtttcgggttgtgctgccacagtacttcatcggtaatgccacgacgggcaaaggccggacctttactggcttcgatgaagatatcggtggtttccattaatttcagaaacgcttcgcggccttcatctttgaaaatatttaagctcagcgcgtgcaaattgcggcgggagagttgcgggtagttcggttgaacgcgaatggtgtcggcccaggcgacgttctcgatccagataacttccgcgccccattctgcgaacatttgcccggcaaacggtccggcgatttcgataccggagaagacaacgcgcaatccggccaacggcccgaatttcggcatgggtagatgatccattatttgctcctgaaaaatttatgtagcgcatgactgccggatgcggcgtaaacgctttatccggcctacattcgtgctcccgtaggcctgataagacgcatcagcgtcgcatcaggcagcgcacggacttagcggtattgcttcagcaccgcacgacccagcgtcaggatctgcatttcgtcagatcccccggagacgcggtctacacgcagatcacgccagaagcggctgatgcggtggttgcccgcaatcccgacaccgcccagcacctgcattgcgctatccacaacttcaaatgccgcattggcgcagaagtatttgcacatcgctgcatcgccagaggtgatggtgccgttgtctgctttccacgctgcttcatacagcatgtttttcatggagtttaatttgatcgccatgtgggcgaatttttcctgaatcaactggaaacgaccaatagcctcgccaaactgcacgcgctgattggcgtagcgcgccgcatcttcaaaggcgcacatcgccgtaccgtagttggtgagggctaccaggaaacgttcatggtcgaactcttctttgacgcggttaaagccgttaccttcccgaccgaacatgtctttctcgtccagttccacgtcgtcaaaggtgatttcacagcagctatccatacgcagaccgagcttttcaagtttggtcactttgatgcccggtttgctcatatcaacaaaccattcggtgtagacaggtttgtccggagaagccccgtcgcgcgccatcaccacgatgtacggggtgtaggcgctgctggtaataaaacacttactaccattaagataaatcttaccatttctacgggtataagtcgttttcaggctacccacgtcggagcccgcgcccggttcggtaatcgcactgttccacatctgcttaccggtgccgcggaaagccataattttgtcgatctgctcttgtgtgccttcgcgcaggaaggtgttgaacccgcccggcaactggtacagcacataggttggtgcccccagacgtcccagctccatccacacggcggcgagagtaacaaaccccgcgtccagaccaccgtgctcttcagggatcagcagactgtcgatacccatatccgccagtgctttgacaaaacgttccgggtagacgctgtcacggtcgcactcggcaaaataggcctcccagttttcgctggccatcagttcgcggataccggcgacaaacagttcctgctcatcatttaaattaaaatccatctttcaacctcttgatattttgggggttaattaatctttccagttctgtttcgcgtctttaataaaggagagcgtcaccataatgttgacgaagaacagcgggcatcctccggcgataatggcggtttgaatcggtttcaggccgccgagcgccagcagaacaataccgataatgccaaccagaatactccaaccgatacgcaccagcagaggtggttcttcaccatcgcgtacttcgcggcaagtggacatcgccagggtataagagcaggcgttaaccagcgtaacggtggcaataaagcagaggatgaagaagccccacatggtggcggtgctgagtggcagagcggcccaggtttcaatgatggcgcgcgccacaccgtactgttcgatcagatttggaatgttgatgatgtttttatctatcaacagcagagtgttactaccgagtacagtccacaggatccaggtactcgctgtcagccccagcaccatgccgaagcacagttcacgcacagtacgaccacgggagatgcgggcgaggaagatactcatctggatagcataaatcacccaccatgcccagtagaacacggtccagccctgcgggaagccgcctttagcgatgggatcggtatagaacaacatgcgcggcagatacatcagcaacatccccacgctatcggtgaagtagttcatgatgaagctggcaccgctgacaatgaacacccaacccagcatcaggaagctcaggtaactacgcacgtcactggcgatacgtacccctttttgcagaccgcaagcgacgcaaatggcgttgaggataatccagcaggtaatgatgatagcgtccagttgcagggtatgcggaatgccaaacaaccattgcatacactcggtcaccagcggcgtggcaaggcccagactggtacccatcgcgaagatcaaggcgacgagatagaagttgtcgacgatagtgccgaacaaccctttggcgtgtttttcacctaccagcggcaccagtgtgctgctggggcgaatcacttccattttgcggacaaagaagaagtaagcgaaggcgacactaaggaagctgtaagtggcccacggcagaggtccccagtggaacaagctgtaagccagccccaactctttcgcccctgtgctgttcggttctaagccaaacggcggggtggagatgtagtagtagatctcaatgcttccccagaacagtacggcagcagacgtacaggaggcgaacatcataaagatccaactggcggtgctaaattctggcggttcgttacctaaacgctttttggcatacgggccaaacaccagccagaaccaaccgaaaagcatcaccaccatataccattcaaatgcccatccccatacattggtgacgtaactgaatacagcattaataacgacattcgctgcatccagatctctgactgtaagccaacaaagtatgccgacgattattaacggcggaaagaaaaccttcggttctattcccgtttttctcttttcattcttcatgagttaattccactgtgaaaacgaatatttattttgcgttcccgtttgttttatttttgttaacatttaatataattattattaacctcgtggacgcgttaatggctaactcataatgggtattcaataagctgtattctgtgattggtatcacatttttgtttcgggtgaatagagggcgttttttcgttaattttgattaataatcagtttgttatgctctgttgtgagtaaaaaataacatctgactttcaatattggtgatccataaaacaatattgaaaatttctttttgctacgccgtgttttcaatattggtgaggaacttaacaatattgaaagttggatttatctgcgtgtgacattttcaatattggtgattaaagttttatttcaaaattaaagggcgtgatatctgtaattaacaccaccgatatgaacgacgtttccttcatgatttctggagatgcaatgaagattattacttgctataagtgcgtgcctgatgaacaggatattgcggtcaataatgctgatggtagtttagacttcagcaaagccgatgccaaaataagccaatacgatctcaacgctattgaagcggcttgccagctaaagcaacaggcagcagaggcgcaggtgacagccttaagtgtgggcggtaaagccctgaccaacgccaaagggcgtaaagatgtgctaagccgcggcccggatgaactgattgtggtgattgatgaccagttcgagcaggcactgccgcaacaaacggcgagcgcactggctgcagccgcccagaaagcaggctttgatctgatcctctgtggcgatggttcttccgacctttatgcccagcaggttggtctgctggtgggcgaaatcctcaatattccggcagttaacggcgtcagcaaaattatctccctgacggcagataccctcaccgttgagcgcgaactggaagatgaaaccgaaaccttaagcattccgctgcctgcggttgttgctgtttccactgatatcaactccccacaaattcctagcatgaaagccattctcggcgcggcgaaaaagcccgtccaggtatggagcgcggcggatattggttttaacgcagaggcagcctggagtgaacaacaggttgccgcgccgaaacagcgcgaacgtcagcgcatcgtgattgaaggcgacggcgaagaacagatcgccgcatttgctgaaaatcttcgcaaagtcatttaattacaggggatgctatgaacacgttttctcaagtctgggtattcagcgataccccttctcgtctgccggaactgatgaacggtgcgcaggctttagctaatcaaatcaacacctttgtcctcaatgatgccgacggcgcacaggcaatccagctcggcgctaatcatgtctggaaattaaacggcaaaccggacgatcggatgatcgaagattacgccggtgtcatggctgacactattcgccagcacggcgcagacggcctggtgctgctgccaaacacccgtcgcggcaaattactggcggcaaaactgggttatcgccttaaagcggcggtgtctaacgatgccagcaccgtcagcgtacaggacggtaaagcgacagtgaaacacatggtttacggtggtctggcgattggcgaagaacgcattgccacgccgtatgcggtactgaccatcagcagcggcacgttcgatgcggctcagccagacgcgagtcgcactggcgaaacgcacaccgtggagtggcaggctccggctgtggcgattacccgcacggcaacccaggcgcgccagagcaacagcgtcgatctcgacaaagcccgtctggtggtcagcgtcggtcgcggtattggcagcaaagagaacattgcgctggcagaacagctttgcaaggcgataggtgcggagttggcctgttctcgtccggtggcggaaaacgaaaaatggatggagcacgaacgctatgtcggtatctccaacctgatgctgaaacctgaactgtacctggcggtggggatctccgggcagatccagcacatggttggcgctaacgcgagccaaaccattttcgccatcaataaagataaaaatgcgccgatcttccagtacgcggattacggcattgttggcgacgccgtgaagatccttccggcgctgaccgcagctttagcgcgttgatccactctggcagggctgcattttggccctgccgctgacagggagctcttatgtccgaagatatctttgacgccatcatcgtcggtgcagggcttgccggtagcgttgccgcactggtgctcgcccgcgaaggtgcgcaagtgttagttatcgagcgtggcaattccgcaggtgccaagaacgtcaccggcgggcgtctctatgcccacagtctggaacacattattcctggtttcgccgactccgcccccgtagaacgcctgatcacccatgaaaaactcgcgtttatgacggaaaagagtgcgatgactatggactactgcaatggtgacgaaaccagcccatcccagcgttcttactccgttttgcgcagtaaatttgatgcctggctgatggagcaggccgaagaagcgggcgcgcagttaattaccgggatccgcgtcgataacctcgtacagcgcgatggcaaagtcgtcggtgtagaagccgatggcgatgtgattgaagcgaaaacggtgatccttgctgatggggtgaactccatccttgccgaaaaattggggatggcaaaacgcgtcaaaccgacggatgtggcggttggcgtgaaggaactgatcgagttaccgaagagcgttattgaagaccgttttcagttgcagggtaatcagggggcggcttgcctgtttgcgggaagtcccaccgatggcctgatgggcggcggcttcctttataccaatgaaaacaccctgagcctggggctggtttgtggtttgcatcatctgcatgacgcgaaaaaaagcgtgccgcaaatgctggaagatttcaaacagcatccggccgttgcaccgctgatcgcgggcggcaagctggtggaatattccgctcacgtagtgccggaagcaggcatcaacatgctgccggagttggttggtgacggcgtattgattgccggtgatgccgccggaatgtgtatgaacctcggttttaccattcgcggtatggatctggcgattgccgccggggaagccgcagcaaaaaccgtgcttagtgcgatgaaaagcgacgatttcagtaagcaaaaactggcggaatatcgtcagcatcttgagagtggtccgctgcgcgatatgcgtatgtaccagaaactaccggcgttccttgataacccacgcatgtttagcggctacccggagctggcggtgggtgtggcgcgtgacctgttcaccattgatggcagcgcgccggaactgatgcgcaagaaaatcctccgccacggcaagaaagtgggcttcatcaatctaatcaaggatggcatgaaaggagtgaccgttttatgacttctcccgtcaatgtggacgtcaaactgggcgtcaataaattcaatgtcgatgaagagcatccgcacattgttgtgaaggccgatgctgataaacaggcgctggagctgctggtgaaagcgtgccccgcaggtctgtacaagaagcaggatgacggcagtgtgcgcttcgattacgccggatgtctggagtgcggcacctgtcgcattctggggctggggagcgcgctggaacagtgggaatacccgcgcggcacctttggtgtggagttccgttacggctgatgttggtttgatacgtaacgccgcactgactctcattgcaaaaaacaggaataaccatgcaaccgtccagaaactttgacgatctcaaattctcctctattcaccgccgcattttgctgtggggaagcggtggtccgtttctggatggttatgtactggtaatgattggcgtggcgctggagcaactgacgccggcgctgaaactggacgctgactggattggcttgctgggcgcgggaacgctcgccgggctgttcgttggcacaagcctgtttggttatatttccgataaagtcggacggcgcaaaatgttcctcattgatatcatcgccatcggcgtgataagcgtggcgacgatgtttgttagttcccccgtcgaactgttggtgatgcgggtacttatcggcattgtcatcggtgcagattatcccatcgccaccagtatgatcaccgagttctccagtacccgtcagcgggcgttttccatcagctttattgccgcgatgtggtatgtcggcgcgacctgtgccgatctggtcggctactggctttatgatgtggaaggcggctggcgctggatgctgggtagcgcggcgatcccctgtttgttgattttgattggtcgattcgaactgcctgaatctccccgctggttattacgcaaagggcgagtaaaagagtgcgaagagatgatgatcaaactgtttggcgaaccggtggctttcgatgaagagcagccgcagcaaacccgttttcgcgatctgtttaatcgccgccattttccttttgttctgtttgttgccgccatctggacctgccaggtgatcccaatgttcgccatttacacctttggcccgcaaatcgttggtttgttgggattgggggttggcaaaaacgcggcactagggaatgtggtgattagcctgttctttatgctcggctgtattccgccgatgctgtggttaaacactgccggacggcgtccattgttgattggcagctttgccatgatgacgctggcgctggcggttttggggctaatcccggatatggggatctggctggtagtgatggcctttgcggtgtatgcctttttctctggcgggccgggtaatttgcagtggctctatcctaatgaactcttcccgacagatatccgcgcctctgccgtgggcgtgattatgtccttaagtcgtattggcaccattgttagcacctgggcactaccgatctttatcaataattacggtatcagtaacacgatgctaatgggggcgggtatcagcctgtttggcttgttgatttccgtagcgtttgccccggagactcgagggatgagtctggcgcagaccagcaatatgacgatccgcgggcagagaatggggtaaattgttcagatttctctcttttctgaatcaatattattgactataagccgcgtgaatatatgactacactttgtgggaaaacaaaggcgtaatcacgcgggctacctatgattcttataatttatgcgcatccgtatccgcatcattcccatgcgaataaacggatgcttgaacaggcaaggacgctggaaggcgtcgaaattcgctctctttatcaactctatcctgacttcaatatcgatattgccgccgagcaggaggcgctgtctcgcgccgatctgatcgtctggcagcatccgatgcagtggtacagcattcctccgctcctcaaactttggatcgataaagttttctcccacggctgggcttacggtcatggcggcacggcgctgcatggcaaacatttgctgtgggcggtgacgaccggcggcggggaaagccattttgaaattggtgcgcatccgggctttgatgtgctgagccagccgctacaggcgacggcaatctactgcgggctgaactggctgccaccgtttgccatgcactgcacctttatttgtgacgacgaaaccctcgaagggcaggcgcgtcactataagcaacgtctgctggaatggcaggaggcccatcatggataattaaggaatggcaggaggcccatcatggatagccatacgctgattcaggcgctgatttatctcggtagcgcagcgctgattgtacccattgcggtacgtcttggtctgggaagcgtacttggctacctgatcgccggctgcattattggcccgtgggggctgcgactggtgaccgatgccgaatctattctgcactttgccgagattggggtggtgctgatgctgtttattatcggcctcgaactcgatccacaaaggctgtggaagctgcgtgcggcagtgttcggctgtggcgcattgcagatggtgatttgcggcggcctgctggggctgttctgcatgttacttgggctgcgctggcaggtcgcggaattgatcggcatgacgctggcgctctcctctacggcgattgccatgcaggcgatgaatgaacgcaatctgatggtgacgcaaatgggtcgcagtgcctttgcggtgctgctgttccaggatatcgcggcgatcccgctggtggcgatgattccgctactggcaacgagcagtgccagcacgacgatgggcgcatttgctctcagcgcgttaaaagtggcgggtgcgctggtgctggtggtattgctggggcgctatgtcacgcgtccggcgctgcgttttgtagcccgctctggcttgcgggaagtgtttagtgccgtggcgttattcctcgtgtttggctttggtttgctgctggaagaggtcggcttgagcatggcgatgggcgcgtttctggcgggcgtactgctggcaagcagcgaataccgtcatgcgctggagagcgatatcgaaccatttaaaggtttgctgttggggctgtttttcatcggtgttggcatgagcatagactttggcacgctgcttgaaaacccattgcgcattgtcattttgctgctcggtttcctcatcatcaaaatcgccatgctgtggctgattgcccgaccgttgcaagtgccaaataaacagcgtcgttggtttgcggtgttgttagggcagggcagtgagtttgcctttgtggtatttggcgcggcgcagatggcgaatgtgctggagccggagtgggcgaaaagcctgaccctggcggtggcgctgagcatggcagcaacgccgattctgctggtgatcctcaatcgccttgagcaatcttctactgaggaagcgcgtgaagccgatgagatcgacgaagaacagccgcgcgtgattatcgccggattcggtcgttttgggcagattaccggacgtttactgctctccagcggggtgaaaatggtggtactcgatcacgatccggaccatatcgaaaccttgcgtaaatttggtatgaaagtgttttatggcgatgccacgcggatggatttactggaatctgccggagcggcgaaagcggaagtgctgattaacgccatcgacgatccgcaaaccaacctgcaactgacagagatggtgaaagaacatttcccgcatttgcagattattgcccgcgcccgcgatgtcgaccactacattcgtttgcgtcaggcaggcgttgaaaagccggagcgtgaaaccttcgaaggtgcgctgaaaaccgggcgtctggcactggaaagtttaggtctggggccgtatgaagcgcgagaacgtgccgatgtgttccgccgctttaatattcagatggtggaagagatggcaatggttgagaacgacaccaaagcccgcgcggcggtctataaacgcaccagcgcgatgttaagtgagatcattaccgaggaccgcgaacatctgagtttaattcaacgacatggctggcagggaaccgaagaaggtaaacataccggcaacatggcggatgaaccggaaacgaaacccagttcctaataaagagtgacgtaaatcacactttacagctaactgtttgtttttgtttcattgtaatgcggcgagtccagggagagagcgtggactcgccagcagaatataaaattttcctcaacatcatcctcgcaccagtcgacgacggtttacgctttacgtatagtggcgacaattttttttatcgggaaatctcaatgatcagtctgattgcggcgttagcggtagatcgcgttatcggcatggaaaacgccatgccgtggaacctgcctgccgatctcgcctggtttaaacgcaacaccttaaataaacccgtgattatgggccgccatacctgggaaagtatcggtcgtccgttgccaggacgcaaaaatattatcctcagcagtcaaccgggtacggacgatcgcgtaacgtgggtgaagagcgtggatgaagccatcgcggcgtgtggtgacgtaccagaaatcatggtgattggcggcggtcgcgtttatgaacagttcttgccaaaagcgcaaaaactgtatctgacgcatatcgacgcagaagtggaaggcgacacccatttcccggattacgagccggatgactgggaaagcgtattcagcgaattccacgatgctgatgcgcagaactctcacagctattgctttgagattctggagcggcggtaattttgtatagaatttacggctagcgccggatgcgacgccggtcgcgtcttatccggccttcctatatcaggctgtgtttaagacgccgccgcttcgcccaaatccttatgccggttgctcggctggacaaaatactgtttatcttcccagcgcaggcaggttaatgtaccaccccagcagcagccggtatccagcgcgtatataccttccggcgtacctttgccctccaggcttgcccagtgaccaaaggcgatgctgtattcttcagcgacagggccaggaatcgcaaaccacggtttcagtggggcaggggcctcttccgggctttctttgctgtacatatccagttgaccgttcgggaagcaaaaacgcatacgggtaaaagcgttggtgataaaacgcagtcttcccagcccccgcaattccggactccagttatttggcatatcgccgtacatggcatcaagaaagaagggataggagtcactgcttagcaccgcttctacatcgcgtgcgcactctttggcggtctgcagatcccactgcggcgtgatccctgcgtgggccatcaccagctttttctcttcgtcgatttgcagcagaggctggcgccgcagccagttaagcagctcgtcggcatccggcgcttccagcagcggtgtcaggcgatctttcggtttattgcggctgatcccggcaaataccgccagcagatgcagatcgtgattgcccagcaccagacgtacgctgtcgcctaaggatttcacatagcgcagaacatccaggctacccggcccgcgcgcgaccagatcgcccgtcagccagagggtatctttcccaggggtaaattctactttatgcagcaatgcgatcagttcatcgtaacaaccatgaacgtcgccaataaggtatgtcgccatattcttttaatgaatgagtgtgggaacggcgagtcggaatacgggaatgtcgatgctgaaagggacgccattttcatcgatcatttcgtagtgaccctgcatggtgcccagcggggtttcaatgattgcaccgctggtgtactggtactcttcgccaggcgcgataagtggctggacgccaaccactccttcgccctggacttcggtttcacggccattgccattggtgatcagccagtaacgccccaacaactgcactggcgctcgccccagattgcgtatggttacggtataagcaaaaacgtaacgttcattatcaggactagattgagcctcaatgtagacgctttgaacctgaatacacactcgggggctattgatcatcgttaactctcctgcaaaggcgcgttctccgccagatagttcgccatctggcaatattgcgcgacagagatattttccgctcgcatcgccgggtcgatccccattcccgttaacacctcgacgctaaacaggttgccgaggctgttacgaatggttttacgacgctggttaaaggcttcggtggtgatgcggctcaacacacgaacatctttaaccgggtgaggcatcgttgcatgaggaaccaggcgcacgacggcggaatccactttgggtggtggtgtaaaggcactcggcggtacttccagtaccgggatcacattgcaatagtattgcgccatgacgcttaatcgaccatacgctttgctgttcggtcctgcaaccagacgattcaccacctctttttgcaacataaagtgcatgtcggcaatggcatcagtatagctaaacagatggaacatcaacggcgtggagatgttataaggcaggttgccgaaaacacgcagcggctgacccattttctcggccagttcaccaaagttaaaggtcatcgcatcctgctgataaatcgtcagtttcgggcctaagaatggatgcgtttgcagacgtgccgccagatcgcggtcaagttcgatgaccgtcagctggtccagacgttcgccgaccggttcggtcaatgccgccagaccggggccgatttcgaccatcgcctggcccttttgcgggttaatggcagacacaatactgtcgatcacgaactgatcgttgagaaagttttgcccgaagcgtttacgggctaagtggccctggtggactcgattattcattgggtgttaacaatcattttgatggcgagattaagcgccgtaataaaactgccggcatcggctttgccacgtcccgccagttcaagcgcggtgccgtggtccacacttgtgcgaataaagggcaggcccagcgtaatgttcacaccgcgcccgaagccctggtattttagcacgggaagaccctgatcgtggtacatcgccagcacggcgtcggcgttatcaagatatttcggctgaaacagggtatcggcaggcagcggcccgttgagtttcatcccctgcgcccgcagctcattgagcaccggaataatggtgtctatctcttccgtacccatatgaccgccttcgcccgcgtgcggattcagcccgcagaccagaatgcgcggttcggcaataccaaatttggtccgcaaatcgtgatgcaaaatagcaatcacttcgtgcaaaagtgcaggggtgatagcgtctgcgatatcgcgcagcggtaaatgcgtcgttgccagcgccacgcgaagttcttcggtcgccagcatcatcaccacctttttcgcctggctacgctcttcgaaaaactcggtatgaccggtaaaaggaatgccagcgtcgttaataacgcctttatgcaccggacctgtgatcagcgcggcaaattcgccgttcagacaaccatcgcacgctcgcgccagcgtttccaccacataatgcccattttcaaccgctaactgccccgcagtgacaggtgcacgtagcgcgacaggaagtagcgttaatgtgcccgcagtttgcggttgtgcaggggagttgggggaataagggcggagggtgagcggcaaaccgagcatcgctgcccggttggtaaggagagtggcatcggcacaaacaaccagttcgaccggccactcacgctgtgcaagctggacaactaagtccgggccaatcccggcgggctcgccgggagtgatcacaacacgttgggttttaaccattagttgctcaggattttaacgtaggcgctggcacgttgttcctgcatccagcttgctgcttcttcgctgaacttacggttcatcagcatgcggtatgcacgatctttctgcgcagcgtcggttttatcgacattacgggtatccagcagttcgattaaatgccagccgaaactagagtgaaccggtgcactcatttgacctttgttcaggcgagtcagggcgtcacggaaggccggatcgaaaatatctggtgtagcccagccgagatcgccgccctggttagcagagcctggatcctgagagaactctttcgctgcggcagcaaaagtcgttttaccactcttgatatcagcagcaatctgttccagtttcacacgggcctgttcgtcagtcatgatcgggctcggtttcagcagaatatggcgagcatgaacttcggtcacgctgatatttttgctttcgccgcgcaggtcgttaactttcagaatatggaagccaacgccggaacgaatcgggccaacaatgtcgcctttcttcgcggtgcttaatgcctgggcgaagatcccgggcaactcctgaatacggccccagcccatctggccgccgttcagcgcctgctggtcggcagaatgagcaatcgccagcttaccgaaatcagcgccgttacgcgcctgatcgacaatggcgcgcgcctggctttccgcttcgttcacctgatcagaggtcgggttttccggcagcgggatcaggatgtggctcaggttcagctcagtgctggcgtcgttttggttacccacctgctgcgccagggattcgacttcctgcggcaggatggtgatgcgacgacgcacctcgttgttacgcacttcagagataatcatctctttgcggatctggttacgataggtgttgtagttcagtccatcgtaagccagacggctgcgcatctgatccagcgtcatgttgttctgtttcgcgatgttagcaatcgcctgatccagctgctcatcggagattttcactcccattttctgccccatctgcaggatgatttgatccatgatcaaacgttccatgatttggtggcgcagcgtcgcgtcatcaggaagttgctgccttgcctgagcagcgttcagttttacgctctgcattaatccatcaacgtcgctttccagcacgacgccgttattgacgacggctgcgactttatcgactacctggggggcagcgaaactggtattcgcgatcatggcgataccgagaagcagcgttttccagttcttcatactttttccatttcaattaaccgcactgcggattacgtggtaaatcaacaaatcacaaagtgttttgatacggcagaatgttgctacgcagcatctcttgcgtacccagaccgtagttggagctcaggccgcgaagttcgatgttaaagccgattgcgttgtcatataccgcatgttgtttatcgttatcccaaccgttcagcttccgctcgtaaccgacgcgaattgcatagcagcaggagctgtattgcacacctaacatagagtcggcttgcttgttagcattggtgtcgtagtagtaggccccaacaatggaccaacgatcggcaattggccagctggcgacagcacctacctggctaataccattcttatattgctcagcagtggaatagtacttaggcagcgtagcctgaatatattccgggctggcgtaacggtaattcagctgtaccagacggtcttcatcccgacggtattcaatgctggagttactggtcgctacgttatccagacgtgtatcgtactgaatcccgccacgcaatccccaacgctcggagatacgccagtaagtatcgcctgcccacaccagactacccgttttgtcgtcattctcccatgttatgttgtcatcgccagtgcgagactccgtgaaatagtagatttgaccaacggaaatattaaaacgttcaacggcagcatcatcatatatgcgagatgtgacaccggtcgtcacctggttagcggaggcaatacggtcaagaccgccgtaagtccggtcccggaacaggccagagtagtcagattgcagcagagagctgtcgtagttatagatgtcgctctgatcgcgatacggcacgtacaaatactgcgcgcgcggttccagcgtttgggtataacccggagccagcatttccatatcgcgttcaaagaccattttgccgtcaactttgaattgcggcattacgcggttaacggattcgtccagcttggtcgtgtttctggagttataccagtcaagattggtttgctgataatgggttgccagcaacttcgcttcggtattgatgctgccccagttattagagagcggcaaattgatggtcggttccaggtgaacacgggttgcttcaggcatgtcgtctctggtgttaacaaagtgcactgcctggccgtaaatacgcgtatcaaacggaccaacatcattctggtagtaattaacgtctaactgcggctctgcgctgtagctactggtgttctgttcgctgaaaacctggaactgcttggtactaacggtggcattgaagttttgcaccgcatagccaacgctgaatttttgcgttgcgtagccgtcagtactggaaccgtacttgttatcgaaatcattgaagtagctaggatcgctgaccttggtgtagtcgacgttgaaacgccacacctgatccatgaccccggagtggttccagtagaataaccaacgacgactactgtcatcgttcgggtgttcatcttcatagactttatcactaggcagatagtccagttccatcaagccagcgcccgcctgggagaggtagcggaattcgttctcccacatgatgttgccacgacgatgcatataatgcggcgtgatggtggcatccatatttggcgcgatgttccagtaatatggcaggtagaactcaaagtagttggtggtggtgtacttggcgttcgggatcaagaaaccagagcgacgtttgtcacccaccggcaactgcaaataggggctataaaagatcggtaccggacccaccttaaagcgggcgttccagatctccgcaacttgttcttcgcggtcatgaataatttcgctacctaccacgctccaggtgtcagaacccggcagacaggaggtaaagctaccgttatccagaatggtatagcggttttcgccacgttgtttcatcaggtccgctttaccgcgaccctggcgacccaccatctggtaatcaccttcccagacgttggtatctttggtgttcagattcgcccagcctttcggccctttgaggatcacctggttatcgtcgtaatggacattaccgagcgcatcaacggtacgtaccggctccggttgtcctggtgcctctttttgatggagctgcacttcgtcggcctgcagacggctgttaccctgcatgatatccacgctgccagtaaacacggcgtcatccgggtagtcccctttcgcgtggtcagcattgatagtcacgggtaagtcattggtatcgccctgtaccagaggacggtcatagcttggcacgcccaacatgcactgactggcgaggtcggctgccagtccctgttgactataaagggcggtggcaatcatggtggccaggagagtggggatacgttttttcatacgttgattttattgttccatcatcggtaacgttgcgcgtgacaaacggtcagagactaacgtactcgtcatctctacgctagtgttaatcctgtccgaatagcgtcagtggtgttaggcacggcattgaatgacaggtatgataatgcaaattataggcgatgtcccacaattgaccgcagccggaaaacggtaaaagcacctttatattgtgggagatagccctgatatccgtgtgtcgatttggggaatatatgcagtattggggaaaaatcattggcgtggccgtggccttactgatgggcggcggcttttggggcgtagtgttaggcctgttaattggccatatgtttgataaagcccgtagccgtaaaatggcgtggttcgccaaccagcgtgagcgtcaggcgctgttttttgccaccacttttgaagtgatggggcatttaaccaaatccaaaggtcgcgtcacggaggctgatattcatatcgccagccagttgatggaccgaatgaatcttcatggcgcttcccgtactgcggcgcaaaatgcgttccgggtgggaaaaagtgacaattacccgctgcgcgaaaagatgcgccagtttcgcagtgtctgctttggtcgttttgacttaattcgtatgtttctggagatccagattcaggcggcgtttgctgatggtagtctgcacccgaatgaacgggcggtgctgtatgtcattgcagaagaattagggatctcccgcgctcagtttgaccagtttttgcgcatgatgcagggcggtgcacagtttggcggcggttatcagcagcaaactggcggtggtaactggcagcaagcgcagcgtggcccaacgctggaagatgcctgtaatgtgctgggcgtgaagccgacggatgatgcgaccaccatcaaacgtgcctaccgtaagctgatgagtgaacaccatcccgataagctggtggcgaaaggtttgccgcctgagatgatggagatggcgaagcagaaagcgcaggaaattcagcaggcatatgagctgataaagcagcagaaagggtttaaatgaccctgtaaatgatgctgagtaactgcccacgattaaaggtggccgccctggcggtcacttctttgagaaaaggcgtttactcagaatggtggacaggctcaatgcacgatttacgggaggggttctgtaggttttatcgcgttgaccctgcttaaggttgagagctttacgacgagcggaattatatttttacgtcttaaaaataaaaaacacatacctgaatgagcgatttttgaaagtatatttattcagaacgcgcatcatgagtttttaactcaatgcgaggctattaccatgaaagtaagtgttccaggcatgccggttacacttttaaatatgagcaagaacgatatttataagatggtgagcggggacaagatggacgtgaagatgaatatctttcaacgcttgtgggagacgttacgccatctgttctggagtgataaacagactgaggcttataaacttctgttcaatttcgtgaataaccagactggcaacatcaacgccagtgaatactttactggggctatcaacgagaatgagagagaaaagtttatcaatagcctggaattattcaataaacttaaaacatgcgcaaaaaatccggatgagttggtcgcaaagggcaatatgcgctgggtcgcccagaccttcggggatatcgagttaagtgtcactttttcattgaaaagaataagatatgtactcagacgttgcagctgcataagggccaaggtaacttgggcgttgatcttagaaaggcttaccttcccggcgttgacatgagggattgttaccttggtaaaaaaacaatgaaaggtagcaatgatatcctttatgagagacctgggtggaatgctaacctgggcgtgctaccccggacggtgctaccccggacggtgctaacccggacggtgctaacctggacggtgctaccgtgaacggtgctacctccttatatgatgaggtaattattattaataaaatcccccccaaaaaaattgatactaaaggagttgctactgaagaagttgctactaaaaaagtactgctgaacaaattactgacaacgcaattattgaatgagccagaataagctaaggttgaaggggctggaacgccccttcaaccttagcagtagcgtgggatgatttcacaattagaaagacctgcatgatgagctagagaagaggctagtgacgcaaggcgtcgtgcaggacacggatcaccgagatgggcatcgccaaccagactgctaattagcccatgaataacaatcagaaaggaccataacagacccgttaaaatgaaatataagagacggtcaacgggtgaagaaaaagttcaaaaattcgctgtggagcaggaagggaattaccgaatggaaagcgtagccacacgcaacaactgaaagcagtttggcagaaacaaaaaatccccggactcggggatttatgtacaagaggcagcccttaggatgagggtataaacgtacaggaaaggttaaaaatccgctggcgctttaaacgtcatactattgccatacgccggatgggtaatcgtcaacatctctgcatgtagcaacaaacgtggtgccatcgctctcgcttctggacttgcataaaaacgatcgccgagaatcggatgacccagcgccagcatatgcacacgcaattgatggctacgcccggtaatcggttttaacaccactcttgccgtgttatccgccgcatactccaccacttcatattccgtctgcgcaggtttacccgtttcgtaacagactttctgtttcgggcggtttggccagtcgcaaatcagcggcagatccaccagaccttctgcgggggatggatgcccccagacgcgggccacatactgctttttcggctcgcgctcgcggaactggcgttttaactcccgctccgcggctttggtcagcgccactacaatcacgccgctggtagccatatccagacgatgcacgctttctgcctgcggataatcacgctgaatgcgcgtcatcacgctgtctttgtgctcttccagacgacccggcacactcaacaaaccgctcggcttgttgaccaccataatatggtcatcctgatacaggataaccaaccagggttcctgcggtggattgtagttttccatccccattttcggctccgttactgatgcgttacaacgatcaaacgcagggcatccagacgccaacctgcctgatccaggctttccattacctgctgacggttgctctcaatggcggtcagttcgtcgtcacgaatgttcgggttcactgcacgcagagcttccagacgagacagctcggcagacagtttttcgtcggcttcgttacgcgctgcatcaatcaatgcacgggcagatttctcgatctgcgattcacccagttgaaggatagcgtgaacatcctgctgcacggcgttaaccagtttgctgccggtgtgacggttaaccgcgttaagctggcggttaaaggtttcaaactctacctgcgccgccaggttgttgccgtttttatccagcagcatacgtaccggcgtcggtggcaggaagcggttgagctgcaactgcttcggagcctgggcttcaaccacataaatcagttccaccaacagcgtacctaccggcaacgctttgttttttaacagactaatcgtgctgctaccggtatcgccagaaaggatcagatccagaccgttgcggatcagcggatgctcccaggtaataaactgtgcatcttcacgcgccagcgccacttcacgatcaaaggtgatggtgatgccatcttcgctcaggccagggaagtccggcaccagcatatgatcggacggcgtcagcacgatcatgttgtcgccgcgatcgtcctgattgataccgataatatcgaacaggttcatggcgaaggcgatcaggttggtatcgtcatcctgctcttcaatgctttctgccagtgcctgggctttttcgccaccgttggagtggatttccagcaggcggtcacgaccctgttccagctgtgctttcagcgtttcatgttgctcgcggcagtttttgatcagatcgtcaaagccttcggtttgatccggactagccagatagttaatcagatcgttgtatacgctatcgtaaatagtgcgtccggtcgggcaggtgtgctcaaatgcatccagaccttcgtgataccagcgcaccagcacgctctgagcggttttctccagataaggcacatggatctgaatatcgtgcgcctggccgatacgatccagacgaccaatacgctgctccagtagatccgggttgaatggcaggtcaaacatcaccatgtggctggcgaactggaagttacgtccttcagaaccgatttcactgcacagcagtacctgtgcgccggtgtcttcttcggcaaaccaggcggcagcgcggtcacgttcgataatgctcataccttcgtggaacaccgcagcgcgaataccttcacgttcgcgcagtacctgctccagttgcagcgcagtggcagctttggcgcagatcaccagcactttctgagagcgatggctggtcaggtagcccatcagccactcaacgcgcggatcgaagttccaccaggtggcgttatcaccttcaaattcctgataaatacgctccgggtagagcatatcgcgagcacgatcttccgcacttttacgtgcgcccataatgccggagactttaatagccgtctgatactgcgtcggtagcggcagcttaatggtgtgcagctcgcgtttcgggaatcctttcacaccgttacgcgtgttacggaacagcacgcggctggtgccgtggcgatccatcagcatgctaaccagctcctgacgggcgctctgggcatcttcgctgtcgctgtttgctgcctgcaacagcggctcgatatcctgctcgccgatcatctcgccgagcatgttcagttcgtcattgctcagtttgttacctgccagcagcatggcaacggcgtccgcaaccggacgataatttttctgctcttcaacgaactgcgcaaaatcgtggaaacggttcgggtccagcagacgcagacgggcgaagtggctttccatccccagctgttccggggtcgcggtcagcagcagaacgcccggcacgtgctctgccagttgttcaatggcctgatattcacggcttggcgcatcttcgctccacaccaggtgatgcgcttcatcgaccaccagcaggtcccattcggcttcacagagatgttccaggcgctgtttgctacgacgggcaaaatccaggctgcaaatcaccagctgttcggtgtcaaacgggttgtaagcatcgtgctgagcttcggcataacgctcatcatcaaatagcgcaaagcgcaggttgaaacggcgcagcatttctaccagccactgatgctgtaaggtttccgggacgataattagcacacgttcagcagcgccagagagcagttgctgatgcaggatcatcccggcttcaatggttttccctaaacccacttcgtcagccagcaggacgcgcggcgcgtggcggcgaccaacatcatgagcgatgttgagctgatgcgggatcaggctggtacgctgaccgcgcaggccgctgtacggcatacggaactgttcgctggaatatttacgcgcgcgataacgcagcgcaaagcggtccatacggtcaatctgcccggcaaacagacggtcctgcggtttgctgaacaccagtttgctatcaaggaaaacttcacgcagggctacgccggactcttcagtatccaggcgagtaccgatataggtcagcaagccattttcttcttttacttcttcgacttgcatctgccagccgtcatggctggtaatggtatcaccagggttgaacatcacgcgggtcacgggggaatcactgcgtgcgtacagacggttttcaccagtagatgggaaaagtaaagtgacagttcgcgcatccaccgcgacaacggttccaagtcccaattcgctttctgtatcgctgatccagcgttgaccaagtgtaaaaggcatatgtgttcggctctatatctttaattgcaggcaataaccacccgctaccgtgcttatgaggtagtggtgttattcaggtccaggaatggaaagggcgctatggtactggatggcaaagcattcgtcacgcatcaaaatggtatctggcgaactcttttttttgctcaaaatagcccaagttgcccggtcataagtgtagcaaaattatcctcaataaaagggagtattccctccgccacgggttgtagctggcgggtcagatagtgttcgtaatccagtggactacgttggtagtccagcggctccgggccgttggtggtccatacgtacttaatggtgccgcgattctgatattgcaaggggcgaccacgcttttggttttcttcatcggcaaggcgagcggcgcgtacatgaggcggcacattacgctgatactcgctcagcggacggcgaaggcgtttacggtaaaccagtcgcgcatccagttcacccgccatcagtttgtcgatggtttcgcgtacatattcctgatatggctcgttgcggaagatgcgcaggtatagctcctgctgaaactgctgggccagcggcgtccagtcggtgcgcacggtttccagccctttaaacaccatccgctgcttgtcgccctcctgaatcagtccggcataacgctttttactgccggtatcggctccgcgaatggttggcatcagaaaacggcagaaatgggtttcatactccagttctaatgcgctggtcagccgttgtttttgcagcgtttccgcccaccaggcgttaacgtgctgcaccagtgcacgaccgattttcgccgcttcttcttcgctatgtgcgcctttcagccagacaaacgtactgtcggtatcgccgtagataacgtcgtagccctgtgcttcaatcaacgctttggtttgccgcatgatctgatgaccacgcatggtgatgctgcttgccagccgcggatcgaagaagcggcaggcggtggtgccgagcacgccataaaaggcattcatgatgattttcagcgcctggctcagcggtttgttaccctggcgtttggcttcatcgcgcccgtgccagatgttagtcacaatctccggcaggcaatgtttttctcggctgaaccaggcatcgagaaaaccttcggtactgtgctctggatcaggctgcgccatgccttccaccagcccgacgggatcaatcagaaaggtgcggatgatgctcgggtacaggcttttatagtccagcaccagcacactatcataaagccctggccgactatccatcacgtagccgccagggctggcgtgcggcggcacttcgccgagattaggcgcgacataaccagcgcgatgcattcgcggaaaatagagatgaccaaatgccgccacgctaccgccgtgtcggtccaccggcaggccgttcaccgttgcccgttcgagtaaaaatggcatgatttcagttttgtggaagatctgcgtcaccagctcgcaatctttcaggttataagttgccagcgcaggtttatcttcggcgaaacggcggtcaatttcgtccattcgatcccacgggttatcgatagattttccttcgcctaatagctcctgagcgacagtttccaggctgaaactagagaaattccagaacgcggatttcagcgcctcgataccgtcgataattagccgacctttagcctgggcaaaaaagacgccgtttttaaagccgtgctcgcgccactccagctcgctattatcgcgcccaagacgcagcggaagacggtaacgctcggcatgtttttgcagcattcgcagatcgaactgcaccacgttccaaccgatgatcacatcaggatcgtagttggcaaaccaggcgttgagtttttccagcaactgcgggcggctggcgacgtattccagttcgaaatcaaggctggaggcgtcgccattctccggccccagcatataaacgatgcgctgcccgcagccttccaggccgatgcagtacagctcaccgtggcgggtggtttcaatatctatagaaacccacttgagcggcggacgatagtcgggatgcggtttcagacgggcattaacgatagtgccattgtgcatatcaccctcgacccacaccggactggtgataaaccgctccatcagatagcgttctggcggacgcacatcggcctcgtagacggtaacgccaccttcacgcaggcgcttttcgtaattcatcaattggcgatgggcgcgacagtaaaggccatacaccggctggcggtgaaaatcctttaacgccagcggtgtcaggcgaaagccttgttcaccctgcaaaatatgctgagcgcggggaacctgatcggcgggaataaacgccacggactcttgcggtgcaagcgtaacctgcaacggcccgttgtccgtcgccagccagaaggagacttctgtcccttgcggggtgtcccgccagtgtcgggttaagataaaacctgcctgcgccacgctgaaaatccatcaaaaaaccaggcttgagtatagcctggtttcgtttgattggctgtggttttatacagtcattactgcccgtaatatgccttcgcgccatgcttacgcagatagtgtttatccagcagcgtttgctgcatatccggtaactgcggcgctaactgacggcagaatatccccatataagcgacctcttccagcacgatggcgttatgcaccgcatcttcggcatttttgccccatgcaaacgggccgtgggaatggaccagaacgccgggcatttgcgctgcatcgataccctgtttttcaaaggtttctacgatgacgttaccggtttcccactcatattcgccgttgatttctgcgtcggtcattttgcgggtgcagggaatggtgccgtagaaatagtcggcgtgggtggtgccggttgctggaatgctctgacccgcctgcgcccagatggtggcgtggcggctgtgcgtatgcacaatgccgccaatggaggggaatgcctgatagagcagccggtgagttggcgtgtcggaggagggctttttcgtaccttcaaccacttcaccggtttcgatgctaaccacgaccatatcgtcagcggtcatgacgctgtaatcgacgccggaaggtttgatcacaaagacgccgcgctcgcgatcaacggcgctgacgttgccccatgtgagcgtgaccaggttgtgttttggcagcgccaggttggcttctaatacctggcgtttgagatcttctaacatgttgactccttcgtgccggatgcgctttgcttatccggcctacaaaatcgcagcgtgtaggcctgataagacgcgccagcgtcgcatcaggcgttgaatgccggatgcgctttgcttatccggcctacaaaatcgcagcgcgtaggcctgataagacgcgccagcgtcgcatcaggcgttgaatgccggatgcgctttgcttatccggcctacaaaatcgcagcgtgtaggccagataagacgcgtcagcgtcgcatcaggcgttacataccggatgcggctacttagcgacgaaacccgtaatacacttcgttccagcgcagcgcgtctttaaacgctggcaggcgtgtgtcgttatcaatcaccgtgatttcaatgtcgtgcatctcggcgaattggcgcatatcgttgaggttcagtgcatggctgaagacggtatggtgcgcgccaccagcgaggatccacgcttcggaagcagttggcagatccggttgcgctttccacagcgcattcgccaccggcagtttcggcagggagtgcggtgttttcaccgtgtcgatgcagttaaccagtagacggtaacgatcgccgagatcaatcaagctggcgacaatcgctgggccggtttgggtattgaagatcaggcgggcaggatcgtccttaccaccaataccgagatgctgaacgtcgaggatcggtttctcttctgcggcgatgctcgggcagacttccagcatatgggagccgagcaccaggtcattacctttctcgaagtgataggtgtagtcctccataaaggaggtgccgccctgcagaccggtactcatcaccttcatgatgcgaagcagggcggcagttttccagtcgccttcgcccgcaaagccgtaaccctgctgcatcagacgctgtacggccagaccaggaagctgtttcagaccgtgcaaatcttcaaaggtggtggtgaacgcgtggaagccaccttgttccaggaaacgcttcatccccagctcaatacgcgccgcttccagcacgttctgtcgttttttgccgtggatttgtgtggcaggcgtcatggtgtagcagctttcgtactcatcgaccagcgcgttaacatcgccgtcgctgatggagttcaccacctgcaccagatcgccaaccgcccaggtattgacggagaaaccgaacttgatctgtgcggcaactttatcgccatcggtgaccgccacttcacgcatgttatcgccaaatcggcagactttcagatgacgggtatcctgtttagagaccgcctgacgcatccaggagccgatacgctcatgggcttgtttatcctgccagtgaccggtaaccacggcatgttgctgacgcatacgcgcgccaatgaagccgaactcgcgaccgccatgtgcagtctggttcaggttcataaagtccatatcgatactgtcccacggcagcgccgcgttgaactgggtgtggaattgcagcaacggtttgttgagcatggtcaggccgttgatccacattttggccggggagaaggtgtgcagccacaccaccagaccagcgcaacgatcgtcgtaattcgcgtcgcggcaaatagcggtgatttcatccggcgtggtgcccagcggtttcaacaccagtttgcagggcagtttcgcttccgtattcagcgcattaacgacgtgctcggcatgttgggtgacctgacgcagggtttccgggccatacagatgctggctgccaatgacaaaccacacttcataattatcaaaaatcgtcattatcgtgtccttatagagtcgcaacggcctgggcagcctgtgccggggcggaagttggaagatagtgttgttcggcgctcatcgcccattgctgatagcggcgataaagctgttcaaagcgttgtgcctgctcgctgcacggttgcagggttttctctaccgcactggccattttttgctgagcacttgggatgtctgcgtgcactttcgcggcgacggcagcaaaaatcgccgcaccgagcgcacagcactggtcagaggcaacaatttgcagcgggcgattcagcacgtcgcagcaggcctgcataatgacctggtttttccgcgcgatgccgcccagtgccatcacgttattaacggcgatcccctgatcggtaaagcactccatgattgcgcgtgcgccaaaggcggtggcagcaatcaaaccgccgaacagcagcggagcgtcggtagcgaggttaagatcggtaatcacccctttcaggcgttggttagcgttcggtgtgcggcggccgttaaaccagtcgagcaccaccggcaggtgatccagagacggatttttggcccatgcttcggtcagcgccggaagcagttgtttctggctggcgttgatttgcgttttcagttccggatgctgggcggcaagctgttccagcggccagccgagtacgcgaccaaaccaggcgtagatatcaccaaacgcgctttggcctgcttccagaccgataaatccaggcaccacgctgccatcaacctgaccgcaaatacctttaactgcccgctcgccaacgctctgtttgtcggcaatcggaatgtcgcaggtggaagtaccgataacttttaccagtgcgttaggctgtgcgcctgcgccaactgcgcccatatggcagtcaaacgcgccgccggaaatcaccacgctttcaggcaggccgagacgctgcgcccattccgggcataaggtgcccaccggaatatcggcagtccaagtgtcagtgaacagcggggaaggcaaatggcgattgaggatcgggtccagctcatcaaagaaactggctggcggcaggccgccccagctttcgtgccacagagatttatgcccggcgctgcaacgtccgcgacgaatatcctgcgggcgggtggtaccggaaagcagagctggcacccagtcgcacagctcaatccagcttgcggcagattgcgccacggcgctgtcctggcgagtcacatgcaggatttttgcccagaaccattcgctggaataaataccaccaatgtagcgggagtagtcaacgttgcccggcgcgtggcacaaacgggtaatctcttccgcttcttcaaccgcagtgtggtctttccacaatacgaacatcgcgttcgggttttcggcaaactccgggcgcagcgccagcacgtttccgtcggcatcaatcggtgcgggcgtgctgccggtactgtcaacgccaatcccgaccacagctgcgcgctgttcgacgctaagctctgcaagcacggttttcagtgccgcttccatactctcaatgtagtcacgcggatgatgacggaactggttattcggggcatcacaaaattgccctttctgccaacggggataccactctacgctggtggcgatctcttcaccggtagcgcagtccaccgccaaagctcgcacagaatcactgccaaaatcgaggccaattgcaatcgccatcgtttcactccatccaaaaaaacgggtatggagaaacagtagagagttgcgataaaaagcgtcaggtaggatccgctaatcttatggataaaaatgctatggcatagcaaagtgtgacgccgtgcaaataatcaatgtggacttttctgccgtgattatagacacttttgttacgcgtttttgtcatggctttggtcccgctttgttacagaatgcttttaataagcggggttaccggttgggttagcgagaagagccagtaaaagacgcagtgacggcaatgtctgatgcaatatggacaattggtttcttctctgaatggtgggagtatgaaaagtatggctgaagcgcaaaatgatcccctgctgccgggatacagctttaacgcccatctggtggcgggtttaacgccgattgaggccaacggttatctcgatttttttatcgaccgaccgctgggaatgaaaggttatattctcaatctcaccattcgcggtcagggggtggtgaaaaatcagggacgagaatttgtctgccgaccgggtgatattttgctgttcccgccaggagagattcatcactacggtcgtcatccggaggctcgcgaatggtatcaccagtgggtttactttcgtccgcgcgcctactggcatgaatggcttaactggccgagtatatttgccaatacgggtttctttcgcccggatgaagcgcaccagccgcatttcagcgacctgtttgggcaaatcattaacgccgggcaaggggaagggcgctatagcgagctgctggcgataaatctgcttgagcaattgttactgcggcgcatggaagcgattaacgagagcctccatccaccgatggataatcgggtacgcgaggcttgtcagtacatcagcgatcacctggcagacagcaattttgatatcgccagcgtcgcacagcatgtttgcttgagcccgagccgtctgagtcatcttttccgccagcagttagggattagcgtcttaagctggcgcgaggaccaacgcattagtcaggcgaagctgcttttgagcactacccggatgcctatcgccaccgtcggtcgcaatgttggttttgacgatcaactctatttcagccgagtatttaaaaaatgcaccggggccagcccgagcgagtttcgtgccggttgtgaagaaaaagtgaatgatgtagccgtcaagttgagttaattggtaacgaatcagacaattgacggcttgacggagtagcatagggtttgcagaatccctgcttcgtccatttgacaggcacattatgcaagcattgctggaacactttattacccaatccaccgtgtatagtttgatggcggtggtgttggtggcctttctggagagcctggcgctggtcggtttgattctacccggtacggtgctgatggcggggctgggagcgctgattggcagcggcgagttaagtttctggcacgcctggctggcagggattattggctgcttgatgggcgactggatttctttctggctgggttggcgttttaaaaagccgttgcatcgctggagttttctgaagaaaaacaaagcactacttgataaaactgaacatgcgttgcatcaacacagcatgttcaccattctggtcggtcgttttgttggcccgacgcgtccgctggtgccaatggtggcgggaatgctggatctgccggtggctaaatttattacgccgaatattatcggctgcctgctgtggccgccgttttacttcctgccagggattctggcgggcgcggcgatcgatattcctgccggaatgcagagcggtgagtttaaatggttgctgctggcaacagcggtgtttttgtgggttggtggctggctgtgctggcggttatggcgcagcggtaaagcgactgaccgtttgagtcattatttgtcccgcggtcgtttgttgtggctgacgccgttgatttctgccatcggcgtggtggcgctggtggtgttaattcgccacccgttgatgccggtgtatatcgatattttgcgtaaagtggttggggtttaagagatagtcttgtgcgggttgcctgatgcgacgcttgccgcgtcttatcaggcctacaaaacgcactacccgtaggtcggataaggcgttcacgccgcatccgacagtgcatattaacccgtaatccccaatagtgcgctagcactcgccttaccgctcaacaactcattggtcataccctgccaggcgatgcgcccgtcggcgactactacgctgcgcgtggcgatccgcgccgcatcttccacgctgtggctcaccatcaatagcgtcattttttgctgctggcagctcgtgctcaccagcgtcaacatctcctgacgtaacgccggatcgagcgcagagaacggttcatcgagcaataaaatcggctgttcgcgtaccagacaacgcgctaacgccactcgctgtcgctgaccgccggaaagctcgcccggtaaccgcgccattaaattatcaatccccatctggcgggcgatagcgtgcattttcccctgctgtaccgcgttcagtttcaatcccggatttagccccagcccgatgttctgtgcgaccgtcaggtggctgaacaggttgttctcctgaaacagcatgctcaccggacggcgactcggcggcatagttgtgtgatctacgccatcgatagtcaggctaccgctggctggcgtcagaaaaccggcgatcaaattcagcagggtacttttacccgcgccgcttggcccgaggatcgccacctgctcgccgcgttccaccgttaagctaaaacgcatcggcaaatggtggtaaagccaggtgatatcagtcagttttaacatttcgccccggtagtttttcaatcacggtaaacagcagaaaacagagcagcagcagaattaacgcggtgaccgcaccgtcctggctgcgataggagccaatttgctggtagagataaaacggcagggtgcggaaatcatcgttaccgaacaacgccaccacgccaaaatcaccaatgctcagcacgcatgcaaaggccagcgcctgcgccagtggacgtttcagggcgcgcagctccaccacttttaagcgactccagccttcaatccccaggctctgacataacatgctgtagcgggcggtgatatcgcgcatcgggttttccagcactttcagcgcataagggatcgccattaacgcattggtgaaaatcacaatgccgtcagcagattgtggcaggccgatagtgttgttgagcagtaaaaagaagccggtagccagcacaatccccggcatggcgaggatcaacatgccgctcatctccagcacctgacccgccagcattttctgccgcgcccgcagttcgcgactgctccatagcagcatcatggtcagcactacgcacaatacacctgccgccagcgcaatacgcaagctggtccacagcgcctgccacagcaccggttgtgccagcacttccggcaactggcgatttaccccatcgacgatcaccgccagtaacggtggcagcaacagcagcagcgccagcacaattaacaccgtgtcgcaaatgcggctatgcagacgatcgtccgggtcgcgccagccttgcagcagcgtggtgccgggcgcaatggccttactcaatcgctgactcaacagcaccagcccgaggcagcacaccatctggagcagcgccagcattgccgcgcgggcaggatcgtagtcgtaactcagcgcctgatagattgccagctcgatagtggtcgcctgcggaccgccccccaggcttagcacggtggcgaagctggcgaaacagagcataaagataagcgcagcaaccggcgggatttgtcgccgtaaccacggccattcgacgaagcggaaaaaatgccagctacgcatcccaagctgggcggcaagttgacgctgttcgccggggatgttttccagtgcctggagtaataagcggctcgccatcggcagattaaaaaacacatgggccagcaaaataccttgcaggccgtaggggctaaaggtccactccagaccgaggctttggcagagtgttgccagccagccctggcgaccatagacgctaagaatgccgaaaacagcgaccaacaccgggaggatcaaggtcattgcacacagacgcaacagcgccagccgacccggaaagcgcctgcgatagagcgcgcgggcgaggaatatcgcgggtatgacagagagcagtgcgctgagaaacgcctgccagaaggagaagcgcaccacatgccacagatagctgtcctgccagactgccacccagtcatcctgcggcgcgttccaccacagggcgagaaacgccgccagcgcaaccgctaccaccagcgtggtggcgcttacacctggaattaaccagccgggaattaacggctgacggcgcgttgccattcgctaatccatgcctgacgttgtgccgccacttcggctggcgtgaactccaacgtggttgcgggtttggtcaatttttcaaaaccggcaggcagcgtgacgtttgccaccggatacatccagttgccggttgggatcgcattctggaaagccggagaaaccataaactggaggaatttttgcgccagctccggctgcttgctggcagcggtgcgggcggcgacttccacttgcagatagtgaccttcgctgaagttcgcggcggcgtagttatctttcttctcttcgagaatgtgataagccggagaggtggtgtaactcagtaccagatcgctttcaccttttaaaaacaggccgtaggcttcgctccagcctttggtgaccgtgaccgttttcttcgccagtttctgccaggcttgtggggcgtcatcgccatagactttttgcatccatagcaacagacccagccccggtgtactggtgcgcggatcctgataaatcacccgccagttttgatcgctctcaaccagttctttcaggctttgtggcgggtttttcagtttgttcttgtcataaacgaaggcgaagtagccataatcaaacggtacgaaagtgtcattattccagccgccgggaacgttaacggcatccgctgccacaccgcttttggcaaacagtccggttttactggcggcgtctaacaggttgttatccagccccagcaccacatcggctttactgtttttgccttccatccgtagacggttgagaaggctaacgccatcttccagcgccaccagtttcagttcgcaattacagtcggcttcaaaggcttttttaaccaccggaccaggcccccagtcggcggcgaaggaatcgtaggtataaacagtcagaacgggtttagcgaaaacgggcgctgtgcacagcaacagcaggggcagacatttttttaacactttgcacctcaaaaaagagtggcaaaggacttgagaaggagcctcaaatcccttcgccggcgttatccggatcaggttcgacgggtattttctcagcgcacgcgtacgcgtggcaccccgttgagaacggcgttagtgtagtgattttgttatcaaccagcaatcatggatccggtggcgcaaaccacgcacttttaaaatcgaaccagccgagggtattcatgcgcaggccgcgcatactgcgttgcccctgaatgatcagccagtggtgcaataatggcaccatcgctttgctggcgaccagttgctggcaccagttcgccagattcatctcgccattgcgccagcgagcagcgtcggcttgccagtcaatgggaatgcaatgttgtagcagtggcacttcgcataaatgtgcgaaaacagagaagtccagcggcagggtaaagttggcgctgtttagccagatatcactttcgatctctcctgtatgccactgatcgtagtcgatctctttgattttcagcgtgacctggtgacttgccagaatctgctgcatgatcccggcaatcacccgatgctcactgtgatcctgataaaaggttagggtgaggctttccaggccagccggtttttcgctctttatggtgcgggcatggtgccaacgggggagcagtccataagccgggaaccacagttgctggtactgttcctcagcgaaatagaccagattagttggagaaagcacatagcttacccagtccctgacttgctgattcgccccgcgatgggtgcggctgtcgaacagtaaatagtagcaaccttcctccaggcggctttcaatctctttttcctcgccctgtggaccttttagcatcagccctccggctggctcgtcggcaatttccggcagaacccagacgttaacttcgtcgattaatgcccggtaaccgaagaagtcatcgaatgcctgaattttcagttgattggtgctgttgcgaatcaccgcatacggaccggtgccgatgggatggctggcaaagttactgagggtttcccattcgcgcggcaggatcatcgccggaacttgccccagcagtaacggtaaccagcggtccggttgcgtgagatggatatccagcgtccagggcgtcgggctcacaatgtcagcaatatggctatagagcggcagcgtattgattcgttttaaagaggcgatcacatcgtccatttccagttcacgaccatggtgaaaatggactcctggacgcaaaaagaaacgccagtgaagcggactaatttgctgccagtggtgggcgatgtctgcttccagttccccattttcctcatttatgcgcgttaggctactgaagatttgccgggcgatatgggtttcggaacggcgcaatgcgctgccaggtagcagattacgcaacggacgatagtagagcacgcgcaggatgtgccgcccctggcggaagctgcggcccagatgagaaaccagcatttgccgcacagtcgctttgtcgccaaccaactgcaccagttgatcgatacgatcctgctccagcaggtcttccgcccgctgttgctgaagcgccagcccggtatagaggaatgtcagacggctgcgtttaccgcgcccgacttccgcttcccacgtcagccagccgcgatcctgcatggtgttgagcagggtgcgcatatgacgacggctgcagctcaataacgctgccagttcgttgagcgttgtgtcctggcttttaccctcgcagcattgccacaggcggatgaactgttgttgcagacgagcagatggcataaaaggggaactcctgtgcaaaagacagcaattttattttccctatattaagtcaataattcctaacgatgaagcaagggggtgccccatgcgtcagttttatcagcactattttaccgcgacagcgaagttgtgctggttgcgttggttaagcgtcccacaacgattaaccatgcttgaaggactgatgcagtgggatgaccgcaattctgaaagttgacttgcctgcatcatgtgtgactgagtattggtgtaaaatcacccgccagcagattatacctgctggttttttttattctcgccgcgctaaaaagggaacgtatgatctggataatgacgatggctcgccgtatgaacggtgtttacgcggcatttatgctggtcgcttttatgatgggggtggccggggcgctacaggctcctacattgagcttatttctgagtcgtgaggttggcgcgcaacctttctggatcggcctcttttatacggtgaatgctattgctgggatcggcgtaagcctctggttggcaaaacgttctgacagtcagggcgatcggcgaaaactgattatattttgctgtttgatggctatcggcaatgcgctattgtttgcatttaatcgtcattatctgacgcttatcacctgtggtgtgcttctggcatctctggccaatacggcaatgccacagttatttgctctggcgcgggaatatgcggataacagcgcgcgagaagtggtgatgtttagcagcgtgatgcgtgcgcagctttctctggcatgggttatcggtccaccgttggcctttatgctggcgttgaattacggctttacggtgatgtttagcattgccgccgggatattcacactcagtctggtattgattgcatttatgcttccgtctgtggcgcgggtagaactgccgagcgaaaatgctttaagtatgcaaggtggctggcaggatagtaacgtacggatgttatttgtcgccagcacgttaatgcggacctgcaacaccatgtacattattgatatgccgttgtggatcagtagcgagttaggattgccagacaaactggcgggtttcctgatggggacggcagctggactggaaataccagcaatgattctggctggctactatgtcaaacgttatggtaagcggcgaatgatggtcatagcagtggcggcaggagtactgttttacaccggattgattttctttaatagccgtatggcgttgatgacgctgcaactttttaacgctgtatttatcggcattgttgcgggtattgggatgctatggtttcaggatttaatgcctggaagagcgggggcagctaccaccttatttactaacagtatttctaccggggtaattctggctggcgttattcagggagcaattgcacaaagttgggggcactttgctgtctactgggtaattgcggttatttctgttgtcgcattatttttaaccgcaaaggttaaagacgtttgatgacgtggacgatagcggaaagcccggtcatttgaccgggcaaggggattaattcataaacgcaggttgttttgcttcataagcggcaatggcgtcgtcgtgctgcaaggtaagcccaatactgtccagaccgttcatcatgcagtggcggcggaaggcatcgatggtaaagcgataggttttctctcccgctttcacctcttgcgcttccagatccacgtcgaaatggatccccggattagctttcaccagcgcaaacagttcgtccacttctgcatcgcttaatttcaccggcagcagctggttgttaaagctattgccgtagaagatgtcagcaaaactcggcgcaatcaccactttaaaaccgtagtcggtcaatgcccagggcgcgtgctcacggctagagccacagccgaagttttctcgtgccagcaaaatggaagcgccctgatactgcgggaagttcagcacgaagtccgggtttggctgttggcctttttcatccagaaaacgccagtcgttaaacagatgcgcgccaaaacccgtacgggtcactttctgcaaaaactgtttcgggatgattgcatcggtatcgacattggcggcatccagcggaaccaccaggcctgtgtgtttgataaatttctctgccatggtgtgctccttatttaatgttgcgaatgtcggcgaaatgtccggtcacagcagcagcggcagccattgccgggctgaccagatgcgtgcgcccgccgcgcccctggcggccttcaaagttacggttgctggtggaggcacaacgttcgcccggattcagacggtcgttgttcatcgccagacacatactgcagccaggcaagcgccattcaaaaccggcttcaataaagattttatccagaccttccgcttccgcctgggcttttaccgggccagagccgggaaccaccagtgcctgcacgcctggcgcgacttttcgccctttggcgatctccgctgccgcgcgtaaatcttcaatgcggctgttggtacaggaaccgataaacactttgtcgatagccacttcggtcagcggaatacccggtttcagccccatataggccagcgctttttctgcgctcgcgcgttcaaccggatcggcaaagctagccggatcgggaatattgtcgttcacggaaatcacctggccgggattggtgccccaggtgacctgcggactaatttcttctgcttgcagagtgacaacggtatcgaaagttgcgccttcgtcggtttgcagggttttccagtaggcaacggcgtcgtcgaaatctttgcctttcggcgcatgcagacggcctttgacatagttaaaggtggtttcgtccggtgcaaccagaccggcttttgcgcccatttcgattgccatattgcacagggtcatacgaccttccatgcttaaatcacggattgcttcgccgcaaaactccaccacatgcccggtgccgcctgcgctaccggttttaccgataattgccagcacgatatcttttgcggtaatgcccggcgcggctttgccctggacttcaattttcatggtttttgcgcggccctgtttcagggtttgcgttgccagtacgtgttcaacttcggaagtgccgataccaaaggccagtgcgccaaacgcgccgtgggtggcggtatggctgtcgccgcagacaatggtcatccccggcaaggtgacgccctgttccggccccattacgtggacgatcccctgatacgggtgattcaggtcatacagttcgacgccaaattctttgcagtttttgatcagttcctgcatctggatacgcgccatttcaccgcaggcattaatgtctttggtctgggtagagacgttgtgatccatggtagcgaaggttttgcccggctgacgtaccgggcgaccgtgggcgcgcagaccatcgaacgcctgcggactggtcacttcatgcaccaggtggcggtcgatatataacagtggggtttcgttttcggcttcgtacacaacgtgagcgtcgaacaatttttcgtataacgtcttagccatgattacaccccttctgctacatagcgggcaatgatatcgcccatttcatcggtactaacggcggcagcgccacgggctaaatccccggtgcgaatgccttcttctaatgcgcggttaatggcgcgttcaatggcgcaagccgcatcatcggcatccaggctgtaacgcagcagcagtgccaggctaaggatttgtgcaatcgggttggcgatgtttttgcctgcgatatctggtgcgctgccgcccgccggttcatacagtccaaaaccttgctcgttcaggctggcggaaggcaacatccccatgctgccagtgatcattgcgcactcgtcagacagaatgtcgccaaacaggttggagcacagcagaacgtcaaactgacttggatctttaatcagctgcatggtggcgttgtcgatgtacatatgcgccagttcgacatccgggtattccgtggcgatctcgttaacgatctcccgccataaaatagaggattgcagcacgttggctttatcgatgctcgtcactttgtggcgacgcttgcgagcagattcaaacgcgatgcgggcgatacgttcgatctcaaaacggtgatacacctcggtatcaaaggctttttcatattgtccgctaccttcgcggccttttggctgaccgaaatagatgccgccggtcagttcgcgcacacacaggatgtcgaagccgtttgcggcaatgtctgcacgcagcggacagaatgcttccagcccctgatacagttttgccgggcgcaggttgctgaataatttgaagtgcttacgcagaggcagcagcgcgccgcgttctggttgctggtctggtggtaaatgttcccacttcgggccgcctacgctgccaaacagcacggcatcggcttgctcacaaccttcaaccgtcgcaggcggcagtggttgcccgtggttatcaatggctgcgccgcctacatcgtaatggctggtggtgatgcgcatcgcaaagcggttgcgcacggcatccagcactttcagcgcctgggtcatcacttccggaccaataccgtcccccggcaatacggcaatatggtaattcttgctcatcacacggtttccttgttgttttcgttgtgttgagctttgcgttgcaactctttttcgacttctgcggcacgccagatattgttcagaacgtgcaccatggctttggcagaactctcgacaatatcggtagccaggccgacgccgtggaagcggcgaccgttgtagttagcgacgatatccacctgacccagcgcatctttaccgtggcctttggcggtcaggctgtatttcaccagttcgacgttatattcagtgatgcggttaattgcctgatagacggcatcgaccggaccgttaccgttggcggcttctgctttgacttcttcgccacaggccagtttgacggcggcggtggcgatatcgttagagccagactgcacgctgaagtaatccagacggaaatgctccggctcttcttgctgcttaccgatgaaggccagcgcctccagatcgtaatcaaacacctgaccttttttgtccgccagcttcaggaaagcatcgtacaaattgtctaaattatattcactttctttataccccatctcatccatgcgatgtttcaccgccgcacgcccgctacgagaggtcagattcagctggatttggttcagaccaatagattctggtgtcatgatttcgtagttttcgcggtttttcagcacgccatcctggtgtataccggaggagtgtgcgaatgcgccgctgccaacaatggctttgtttgccgggatcggcatattacaaatctggctaactaactggctggtgcgccatatctcctggtgattaatggcggtgtggacgttgagaatatccttacgaactttgatcgccatgatgacttcttccagggaacagtttccggcacgctcgccgatcccgttcattgcgccttccacctggcgtgcaccggcatgtaccgccgccagactgtttccgaccgccaggcccaaatcgtcgtgggtatgtacggagataatggctttgtcgatgttaggcacgcgttcatacaggccgctgatgattccggcgaactcaaacggcatggtgtagcccacggtgtccggaatgttgatggtggtggcaccggcattaatcgccgcttcgaccactcgcgccagatcggcaatgggtgtacgcccggcatcttcgcaagaaaattcaacatcatcggtgtaattacgggcgcgtttcaccatatagatagcgcgttcgatcacctcgtccagcgtgctgcgcagcttggtggcgatgtgcattgggctagtggcaataaaggtatgaatacggaaggcttcggcgactttcagggattcggccgccacgtcgatatctttttccacgcagcgagctaacgcacatacgcggctgtttttaacctggcgggcgatggtttgcacgctttcaaaatcgcccgggctagagacggggaaaccgacttccatcacgtcaacacccatacgctcaagggccagcgcaatttgcagtttttctttcacactcaagcttgcctgtaacgcctgttcaccgtcgcgcaatgtggtatcgaaaataatgacttgctggctcatggtttgggtccttgtctcttttagagcgcctcgcttcgggcataaaaaaacccgcgcaatggcgcgggttttttgtttgactgcgtgctggcttaatgctggatgccgctcactcgtctaccgcgcaaagaagatgcgtttagtagtagtagaccgataaagcgaacgatgtgagtcattaaatcagctccagatgaatgcgatatgcttttagagttactggatacaaaaacggatgtcaaccctgacgcaataaaaacgtcccgccagcgtgagttctgcatccgtaaaattagctaattgtgctgcggtggttaaagtaagcgatattaatttctgcttaactaccgacgcttttcatcggttgacatatttcagcataaatttttgcatctaatcaacgaggaaaaaggggacaaaatgcacgcgttgcaaaacctatcctgatgatttgtattgaattatatgttttgcgattttttttgatattgatttggtgaatattattgatcaattaatgttaagaattaatgcattaaatatataaattaattattaaataagcacatttaatccattttgtagatgattgagtattcgcggtagttatgattagattgttttcgcaacaaaaacattatggattattatgctgtggtaaatgactcattccacggcaatggattctgtttttatcagaacccgtatctttatgttttccgaattttactcattttgctttttcttattttatatgcatgataaatcatattcttcaggattatttctctgcattccaataagggaaagggagttaagtgtgacagtggagttaagtatgccagaggtacaaacagatcatccagagacggcggagttaagcaaaccacagctacgcatggtcgatctcaacttattaaccgttttcgatgccgtgatgcaggagcaaaacattactcgtgccgctcatgttctgggaatgagccaacctgcggtcagtaacgctgttgcacgcctgaaggtgatgtttaatgacgagctttttgttcgttatggccgtggtattcaaccgactgctcgcgcatttcaactttttggtagtgttcgtcaggcattgcaactagtacaaaatgaattgcctggtagtggttttgaacccgcgagcagtgaacgtgtatttcatctttgtgtttgcagcccgttagacagcattctgaccagccagatttataatcacattgagcagattgcgccaaatatacatgttatgttcaagtctagtttaaatcagaacactgaacatcagctgcgttatcaggaaacggagtttgtgattagttatgaagacttccatcgtcctgaatttaccagcgtaccattatttaaagatgaaatggtgctggtagccagcaaaaatcatccaacaattaagggcccgttactgaaacatgatgtttataacgaacaacatgcggcggttagcctcgatcgtttcgcgagttttagtcaaccttggtatgacacggtagataagcaagccagtatcgcgtatcagggcatggcaatgatgagcgtacttagcgtggtgagccaaacgcatttggtcgctattgcgccgcgttggctggctgaagagttcgctgaatccttagaattacaggtattaccgctgccgttaaaacaaaacagcagaacctgttatctctcctggcatgaagctgccgggcgcgataaaggccatcagtggatggaagagcaattagtcagtatttgcaaacgctaactgattgcagaataggtcagacatgaatgtctggtttattctgcattttttattgaatgtagaattttattctgaatgtgtgggctctctattttaggattaattaaaaaaatagagaaattgctgtaagttgtgggattcagccgatttattatcaatttaatcctctgtaatggaggattttatcgtttcttttcacctttcctcctgtttattcttattaccccgtgtttatgtctctggctgccaattgcttaagcaagatcggacggttaatgtgttttacacattttttccgtcaaacagtgaggcaggccatggagatgttgtctggagccgagatggtcgtccgaagccttatcgatcagggcgttaaacaagtattcggttatcccggaggcgcagtccttgatatttatgatgcattgcataccgtgggtggtattgatcatgtattagttcgtcatgagcaggcggcggtgcatatggccgatggcctggcgcgcgcgaccggggaagtcggcgtcgtgctggtaacgagcggtccaggggcgaccaatgcgattactggcatcgccaccgcttatatggattccattccattagttgtcctttccgggcaggtagcgaccagcttgataggttacgatgcctttcaggagtgcgacatggtggggattagccgaccggtggttaaacacagttttctggttaagcaaacggaagacattccgcaggtgctgaaaaaggctttctggctggcggcaagtggtcgcccaggaccagtagtcgttgatttaccgaaagatattcttaatccggcgaacaaattaccctatgtctggccggagagcgtcagtatgcgttcttacaatcccactactaccggacataaagggcaaattaagcgtgctctgcaaacgctggtagcggcaaaaaaaccggttgtctacgtaggcggtggggcaatcacggcgggctgccatcagcagttgaaagaaacggtggaggcgttgaatctgcccgttgtttgcagtttgatggggctgggggcgtttccggcaacgcatcgtcaggcactgggcatgctgggaatgcacggtacctacgaagccaatatgacgatgcataacgcggatgtgattttcgccgtcggggtacgatttgatgaccgaacgacgaacaatctggcaaagtactgcccaaatgccactgttctgcatatcgatattgatcctacttccatttctaaaaccgtgactgcggatatcccgattgtgggggatgctcgccaggtcctcgaacaaatgcttgaactcttgagccaagaatccgcccatcaaccactggatgagatccgcgactggtggcagcaaattgaacagtggcgcgctcgtcagtgcctgaaatatgacactcacagtgaaaagattaaaccgcaggcggtgatcgagactctttggcggttgacgaagggagacgcttacgtgacgtccgatgtcgggcagcaccagatgtttgctgcactttattatccattcgacaaaccgcgtcgctggatcaattccggtggcctcggcacgatgggttttggtttacctgcggcactgggcgtcaaaatggcgttgccagaagaaaccgtggtttgcgtcactggcgacggcagtattcagatgaacatccaggaactgtctaccgcgttgcaatacgagttgcccgtactggtggtgaatctcaataaccgctatctggggatggtgaagcagtggcaggacatgatctattccggccgtcatagtcaatcttatatgcaaagcctacccgatttcgtccgtctggcggaagcctatgggcatgtcgggatccagatttctcatccgcatgagctggaaagcaaacttagcgaggcgctggaacaggtgcgcaataatcgcctggtgtttgttgatgttaccgtcgatggcagcgagcacgtctacccgatgcagattcgcgggggcggaatggatgaaatgtggttaagcaaaacggagagaacctgattatgcgccggatattaagtgtcttactcgaaaatgaaagtggcgcgttatcccgcgtgattggccttttttcccagcgtggctacaacattgaaagcctgaccgttgcgccaaccgacgatccgacattaagccgtatgaccatccagaccgtgggcgatgaaaaagtacttgagcagatcgaaaagcaattacacaaactggtcgatgtcttgcgcgtgagtgagttggggcagggcgcgcatgttgagcgggaaatcatgctggtgaaaattcaggccagcggttacgggcgtgacgaagtgaaacgtaatacggaaatattccgtgggcaaattatcgatgtcacacccagcctttataccgttcaattagcaggcaccagcggtaagcttgatgcatttttagcaagcattcgcgatgtggcgaaaattgtggaggttgctcgctctggtgtggtcggacttagccgcggcgataaaataatgcgttgagaatgatctcaatgcgcaatttacagcccaacatgtcacgttgggctttttttgcgaaatcagtgggaacctggaataaaagcagttgccgcagttaattttctgcgcttagatgttaatgaatttaacccataccagtacaatggctatggtttttacattttacgcaaggggcaattgtgaaactggatgaaatcgctcggctggcgggagtgagccggaccactgcaagctatgttattaacggcaaagcgaagcaataccgtgtgagcgacaaaaccgttgaaaaagtcatggctgtggtgcgtgagcacaattaccacccgaacgccgtggcagctgggcttcgtgctggacgcacacgttctattggtcttgtgatccccgatctggagaacaccagctatacccgcatcgctaactatcttgaacgccaggcgcggcaacggggttatcaactgctgattgcctgcagtgaagatcagccagacaacgaaatgcggtgcattgagcaccttttacagcgtcaggttgatgccattattgttagcacgagcttgcctcctgagcatcctttttatcaacgctgggctaacgacccgttcccgattgtcgcgctggaccgcgccctcgatcgtgaacacttcaccagcgtggttggtgccgatcaggatgatgccgaaatgctggcggaagagttacgtaagtttcccgccgagacggtgctttatcttggtgcgctaccggagctttctgtcagcttcctgcgtgaacaaggtttccgtactgcctggaaagatgatccgcgcgaagtgcatttcctgtatgccaacagctatgagcgggaggcggctgcccagttattcgaaaaatggctggaaacgcatccgatgccgcaggcgctgttcacaacgagctttgcgttgttgcaaggagtgatggatgtcacgctgcgtcgcgacggcaaactgccttctgacctggcaattgccacctttggcgataacgaactgctcgacttcttacagtgtccggtgctggcagtggctcaacgtcaccgcgatgtcgcagagcgtgtgctggagattgtcctggcaagcctggacgaaccgcgtaagccaaaacctggtttaacgcgcattaaacgtaatctctatcgccgcggcgtgctcagccgtagctaagccgcgaacaaaaatacgcgccaggtgaatttccctctggcgcgtagagtacgggactggacatcaatatgcttaaagtaaataagactattcctgactattattgataaatgcttttaaacccgcccgttaattaactcaccagctgaaattcacaataattaagtgatatcgacagcgcgtttttgcattattttgttacatgcggcgatgaattgccgatttaacaaacacttttctttgcttttgcgcaaacccgctggcatcaagcgccacacagacgtaacaaggactgttaaccggggaagatatgtcctaaaatgccgctcgcgtcgcaaactgacactttatatttgctgtggaaaatagtgagtcattttaaaacggtgatgacgatgagggattttttcttacagctattcataacgttaatttgcttcgcacgttggacgtaaaataaacaacgctgatattagccgtaaacatcgggttttttacctcggtatgccttgtgactggcttgacaagcttttcctcagctccgtaaactcctttcagtgggaaattgtggggcaaagtgggaataaggggtgaggctggcatgttccggggagcaacgttagtcaatctcgacagcaaagggcgcttaagtgtgcctacccgttatcgggaacagctgcttgagaacgctgccggtcaaatggtttgcaccattgacatttatcacccgtgcctgctgctttaccccctgcctgaatgggaaattatcgagcaaaaattaagccgtctgagcagcatgaacccggttgagcgccgtgtgcagcgcctactgttaggtcatgccagcgaatgtcagatggatggcgcaggtcgattgttaatcgcgccagtactgcggcaacatgccgggctgacaaaagaagtgatgctggttggacagttcaacaagtttgagctgtgggatgaaacaacctggcatcaacaggtcaaggaagatatcgacgcagagcagttggctaccggagacttaagcgagcgactgcaggacttgtctctataaaatgatggaaaactataaacatactacggtgctgctggatgaagccgttaatggcctcaatatccgtcctgatggcatctacattgatgggacttttggtcgcggtggtcacagtcgtctgatcctcagccagcttggcgaagaggggcgtttgctggcgatcgatcgcgacccgcaggctatcgccgttgcgaagactattgatgatccgcgcttctccatcatccacggacctttctccgcgctgggcgaatacgttgccgagcgcgatcttatcggcaagatcgacggcattctcctcgatcttggcgtctctagtccgcaacttgatgatgctgaacgtggcttttcctttatgcgcgatggtccgctggacatgcgtatggacccaacccgtgggcagagtgccgctgaatggctacaaaccgcagaagaagccgatatcgcctgggtattgaaaacctatggtgaagagcgttttgccaaacgcattgcccgcgccattgtcgagcgtaaccgcgaacagccgatgacccgcaccaaagaactggcggaagtcgtggctgctgcaacgccggtgaaagataagtttaaacatcccgcgacccgtaccttccaggcggtgcgcatttgggtaaacagtgaactggaggagatagagcaggcgctaaaaagcagcctcaacgtgctggccccgggtgggcggcttagcatcatcagcttccacagcctggaagaccgtattgtgaaacgttttatgcgtgaaaacagccgcggtccgcaagttccggcagggttaccgatgactgaagagcagctcaaaaaactgggtggccgtcagctgcgagcactaggcaagttaatgccgggcgaagaagaggtggctgagaaccctcgtgcccgtagtagtgttctgcgtattgcagagaggacgaatgcatgatcagcagagtgacagaagctctaagcaaagttaaaggaagcatgggaagccacgagcgccatgcattgcctggtgttatcggtgacgatcttttgcgatttgggaagctgccactctgcctgttcatttgcattattttgacggcggtgactgtggtaaccacggcgcaccatacccgtttactgaccgctcagcgcgaacaactggtgctggagcgagatgctttagacattgaatggcgcaacctgatccttgaagagaatgcgctcggcgaccatagccgggtggaaaggatcgccacggaaaagctgcaaatgcagcatgttgatccgagtcaagaaaatatcgtagtgcaaaaataaggataaacgcgacgcatgaaagcagcggcgaaaacgcagaaaccaaaacgtcaggaagaacatgccaactttatcagttggcgttttgcgttgttatgcggctgtattctcctggcgctggcttttctgctcggacgcgtagcgtggttacaagttatctccccggatatgctggtgaaagagggcgacatgcgttctcttcgcgttcagcaagtttccacctcccgcggcatgattactgaccgttctggtcgcccgttagcggtgagcgtgccggtaaaagcgatttgggctgacccgaaagaagtgcatgacgctggcggtatcagcgtcggtgaccgctggaaggcgctggctaacgcgctcaatattccgctggatcagcttagtgcccgcattaacgccaacccgaaagggcgctttatttatctggcgcgtcaggtgaaccctgacatggcggactacatcaaaaaactgaaactgccggggattcatctgcgtgaagagtctcgccgttactatccgtccggcgaagtgactgctcacctcatcggctttactaacgtcgatagtcaagggattgagggcgttgagaagagtttcgataaatggcttaccgggcagccgggtgagcgcattgtgcgtaaagaccgctatggtcgcgtaattgaagatatttcttctactgacagccaggcagcgcacaacctggcgctgagtattgatgaacgcctgcaggcgctggtttatcgcgaactgaacaacgcggtggcctttaacaaggctgaatctggtagcgccgtgctggtggatgtcaacaccggtgaagtgctggcgatggctaacagcccgagttacaaccctaacaatctgagcggcacgccgaaagaggcgatgcgtaaccgtaccatcaccgacgtgtttgaaccgggcagtacggttaaaccgatggtggtaatgaccgcgttgcaacgtggcgtggtgcgggaaaacagcgtactcaataccattccttatcgaattaacggccacgaaatcaaagacgtggcacgctacagcgaattaaccctgaccggggtattacagaagagcagtaacgtcggtgtttccaagctggcgttagcgatgccgtccagtgcgttagtagatacttacagtcgttttggactgggaaaagcgaccaatttggggttggtcggagaacgcagtggcttatatcctcaaaaacaacggtggtctgacatagagagggccaccttctctttcggctacgggctaatggtaacaccattacagttagcgcgagtctacgcaactatcggcagctacggcatttatcgcccactgagcattaccaaagttgaccccccggttcccggtgaacgtgtcttcccggaatccattgtccgcactgtggtgcatatgatggaaagcgtggcgctaccaggcggcggcggcgtgaaggcggcgattaaaggctatcgtatcgccattaaaaccggtaccgcgaaaaaggtcgggccggacggtcgctacatcaataaatatattgcttataccgcaggcgttgcgcctgcgagtcagccgcgcttcgcgctggttgttgttatcaacgatccgcaggcgggtaaatactacggcggcgccgtttccgcgccggtctttggtgccatcatgggcggcgtattgcgtaccatgaacatcgagccggatgcgctgacaacgggcgataaaaatgaatttgtgattaatcaaggcgaggggacaggtggcagaagctaaagcctgagcgcttcgcgctggttgttgttatcaacgatccgcaggcgggtaaatactacggcggcgccgtttccgcgccggtctttggtgccatcatgggcggcgtattgcgtaccatgaacatcgagccggatgcgctgacaacgggcgataaaaatgaatttgtgattaatcaaggcgaggggacaggtggcagatcgtaatttgcgcgaccttcttgctccgtgggtgccagacgcacctagccgagcactgcgagagatgacactcgacagccgtgtggctgcggcgggcgatctctttgtagctgtagtaggtcatcaggcggacgggcgtcgatatatcccgcaggcgatagcgcaaggtgtggctgccattattgcagaggcgaaagatgaggcgaccgatggtgaaatccgtgaaatgcacggcgtaccggtcatctatctcagccagctcaacgagcgtttatctgcactggcgggccgcttttaccatgaaccctctgacaatttacgtctcgtgggcgtaacgggcaccaacggcaaaaccacgactacccagctgttggcgcagtggagccaactgcttggcgaaatcagcgcggtaatgggcaccgttggtaacggcctgctggggaaagtgatcccgacagaaaatacaaccggtagcgcagtcgatgttcagcatgagctggcggggctggtggatcagggcgcgacgttttgcgcaatggaagtttcctcccacgggctggtacagcaccgtgtggcggcattgaaatttgcggcgagcgtctttaccaacttaagccgcgatcaccttgattatcatggtgatatggaacactacgaagccgcgaaatggctgctttattctgagcatcattgcggtcaggcgattattaacgccgacgatgaagtgggccgccgctggctggcaaaactgccggacgcggttgcggtaagtatggaagatcatattaatccgaactgtcacggacgctggttgaaagcgaccgaagtgaactatcacgacagcggtgcgacgattcgctttagcagtagttggggcgatggcgaaattgaaagccatctgatgggcgcttttaacgtcagcaacctgctgctcgcgctggcgacactgttggcactcggctatccactggctgatctgctgaaaaccgccgcgcgtctgcaaccggtttgcggacgtatggaagtgttcactgcgccaggcaaaccgacggtggtggtggattacgcgcatacgccggatgcactggaaaaagccttacaggcggcgcgtctgcactgtgcgggcaagctgtggtgtgtctttggctgtggtggcgatcgcgataaaggtaagcgtccactgatgggcgcaattgccgaagagtttgctgacgtggcggtggtgacggacgataacccgcgtaccgaagaaccgcgtgccatcatcaacgatattctggcgggaatgttagatgccggacatgccaaagtgatggaaggccgtgctgaagcggtgacttgcgccgttatgcaggctaaagagaatgatgtggtactggtcgcgggcaaaggccatgaagattaccagattgttggcaatcagcgtctggactactccgatcgcgtcacggtggcgcgtctgctgggggtgattgcatgattagcgtaacccttagccaacttaccgacattctcaacggtgaactgcaaggtgcagatatcacccttgatgctgtaaccactgatacccgaaaactgacgccgggctgcctgtttgttgccctgaaaggcgaacgttttgatgcccacgattttgccgaccaggcgaaagctggcggcgcaggcgcactactggttagccgtccgctggacatcgacctgccgcagttaatcgtcaaggatacgcgtctggcgtttggtgaactggctgcatgggttcgccagcaagttccggcgcgcgtggttgctctgacggggtcctccggcaaaacctccgttaaagagatgacggcggcgattttaagccagtgcggcaacacgctttatacggcaggcaatctcaacaacgacatcggtgtaccgatgacgctgttgcgcttaacgccggaatacgattacgcagttattgaacttggcgcgaaccatcagggcgaaatagcctggactgtgagtctgactcgcccggaagctgcgctggtcaacaacctggcagcggcgcatctggaaggttttggcagccttgcgggtgtcgcgaaagcgaaaggtgaaatctttagcggcctgccggaaaacggtatcgccattatgaacgccgacaacaacgactggctgaactggcagagcgtaattggcagtcgcaaagtgtggcgtttcagtcccaatgccgccaacagcgatttcaccgccaccaatatccatgtgaccagccacggtacggaatttaccctacaaaccccaaccggtagcgtcgatgttctgctgccgttgccggggcgtcacaatattgcgaatgcgctggcagccgctgcgctctccatgtccgtgggcgcaacgcttgatgctatcaaagcggggctggcaaatctgaaagctgttccaggccgtctgttccccatccaactggcagaaaaccagttgctgctcgacgactcctacaacgccaatgtcggtagtatgactgcagcagtccaggtactggctgaaatgccgggctaccgcgtgctggtggtgggcgatatggcggaactgggcgctgaaagcgaagcctgccatgtacaggtgggcgaggcggcaaaagctgctggtattgaccgcgtgttaagcgtgggtaaacaaagccatgctatcagcaccgccagcggcgttggcgaacattttgctgataaaactgcgttaattacgcgtcttaaattactgattgctgagcaacaggtaattacgattttagttaagggtagtcgtagtgccgccatggaagaggtagtacgcgctttacaggagaatgggacatgttaatataagctttacaggagaatgggacatgttagtttggctggccgaacatttggtcaaatattattccggctttaacgtcttttcctatctgacgtttcgcgccatcgtcagcctgctgaccgcgctgttcatcagtttgtggatgggcccgcgtatgattgctcatttgcaaaaactttcctttggtcaggtggtgcgtaacgacggtcctgaaagtcacttcagcaagcgcggtacgccgaccatgggcgggattatgatcctgacggcgattgtgatctccgtactgctgtgggcttacccgtccaatccgtacgtctggtgcgtgttggtggtgctggtaggttacggtgttattggctttgttgatgattatcgcaaagtggtgcgtaaagacaccaaagggttgatcgctcgttggaagtatttctggatgagcgtcattgcgctgggtgtcgccttcgccctgtaccttgccggcaaagacacgcccgcaacgcagctggtggtcccattctttaaagatgtgatgccgcagctggggctgttctacattctgctggcttacttcgtcattgtgggtactggcaacgcggtaaacctgaccgatggtctcgacggcctggcaattatgccgaccgtatttgtcgccggtggttttgcgctggtggcgtgggcgaccggcaatatgaactttgccagctacttgcatataccgtatctgcgacacgccggggaactggttattgtctgtaccgcgatagtcggggcaggactgggcttcctgtggtttaacacctatccggcgcaggtctttatgggcgatgtaggtagcctggcgttaggtggtgcgttaggcattatcgccgtactgctacgtcaggaattcctgctggtgattatggggggcgtgttcgtggtagaaacgctttctgtcatcctgcaggtcggctcctttaaactgcgcggacaacgtattttccgcatggcaccgattcatcaccactatgaactgaaaggctggccggaaccgcgcgtcattgtgcgtttctggattattagcctgatgctggttctgattggtctggcaacgctgaaggtacgttaatcatggctgattatcagggtaaaaatgtcgtcattatcggcctgggcctcaccgggctttcctgcgtggactttttcctcgctcgcggtgtgacgccgcgcgttatggatacgcgtatgacaccgcctggcctggataaattacccgaagccgtagaacgccacacgggcagtctgaatgatgaatggctgatggcggcagatctgattgtcgccagtcccggtattgcactggcgcatccatccttaagcgctgccgctgatgccggaatcgaaatcgttggcgatatcgagctgttctgtcgcgaagcacaagcaccgattgtggcgattaccggttctaacggcaaaagcacggtcaccacgctagtgggtgaaatggcgaaagcggcgggggttaacgttggtgtgggtggcaatattggcctgcctgcgttgatgctactggatgatgagtgtgaactgtacgtgctggaactgagcagcttccagctggaaaccacctccagcttacaggcggtagcagcgaccattctgaacgtgactgaagatcatatggatcgctatccgtttggtttacaacagtatcgtgcagcaaaactgcgcatttacgaaaacgcgaaagtttgcgtggttaatgctgatgatgccttaacaatgccgattcgcggtgcggatgaacgctgcgtcagctttggcgtcaacatgggtgactatcacctgaatcatcagcagggcgaaacctggctgcgggttaaaggcgagaaagtgctgaatgtgaaagagatgaaactttccgggcagcataactacaccaatgcgctggcggcgctggcgctggcagatgctgcagggttaccgcgtgccagcagcctgaaagcgttaaccacattcactggtctgccgcatcgctttgaagttgtgctggagcataacggcgtacgttggattaacgatagcaaagcgaccaacgtcggcagtacggaagcggcgctgaatggcctgcacgtagacggcacactgcatttgttgctgggtggcgatggtaaaagcgcggactttagcccactggcgcgttacctgaatggcgataacgtacgtctgtattgtttcggtcgtgacggcgcgcagctggcggcgctacgtccggaagtggcagaacaaaccgaaactatggaacaggcgatgcgcttgctggctccgcgtgttcagccgggcgatatggttctgctctccccagcctgtgccagccttgatcagttcaagaactttgaacaacgaggcaatgagtttgcccgtctggcgaaggagttaggttgatgcgtttatctctccctcgcctgaaaatgccgcgcctgccaggattcagtatcctggtctggatctccacggcgctaaagggctgggtgatgggcagccgggaaaaagataccgacagcctgatcatgtacgatcgcaccttactgtggctgaccttcggcctcgcggcgattggctttatcatggtgaccagcgcgagtatgcccatagggcaacgcttaaccaacgatccgttcttcttcgcgaagcgtgatggtgtctatctgattttggcgtttattctggcgatcattacgctgcgtctgccgatggagttctggcaacgctacagtgccacgatgctgctcggatctatcatcctgctgatgatcgtcctggtagtgggtagcagcgttaaaggggcaagccgttggatcgatctcggtttgctgcgtatccagcctgcggagctgacaaaactgagcctgttttgctatatcgccaactatctggtgcgtaaaggcgacgaagtacgtaataacctgcgcggcttcctgaaaccgatgggcgtgattctggtgttggcagtgttactgctggcacagccagaccttggtacggtggtggtgttgtttgtgactacgctggcgatgttgttcctggcgggagcgaaattgtggcagttcattgccattatcggtatgggcattagtgcggttgtgttgctgatactcgccgaaccgtaccgtatccgccgtgttaccgcattctggaacccgtgggaagatccctttggcagcggctatcagttaacgcaaagcctgatggcgtttggtcgcggcgaactttgggggcaaggtttaggtaacagcgtacaaaaactggagtatctgccggaagcgcacactgactttattttcgccattatcggcgaagaactggggtatgtcggtgtggtgctggcacttttaatggtattcttcgtcgcttttcgcgcgatgagcattggccgtaaagcattagaaattgaccaccgtttttccggttttctcgcctgttctattggcatctggtttagcttccaggcgctggttaacgtaggcgcggcggcggggatgttaccgaccaaaggtctgacattgccgctgatcagttacggtggtagcagcttactgattatgagcacagccatcatgatgctgttgcgtattgattatgaaacgcgtctggagaaagcgcaggcgtttgtacgaggtagtcgatgagtggtcaaggaaagcgattaatggtgatggcaggcggaaccggtggacatgtattcccgggactggcggttgcgcaccatctaatggctcagggttggcaagttcgctggctggggactgccgaccgtatggaagcggacttagtgccaaaacatggcatcgaaattgatttcattcgtatctctggtctgcgtggaaaaggtataaaagcactgatagctgccccgctgcgtatcttcaacgcctggcgtcaggcgcgggcgattatgaaagcgtacaaacctgacgtggtgctcggtatgggaggctacgtgagtggtccaggtggtctggccgcgtggagcttaggcattccggttgtacttcatgaacaaaacggtattgcgggcttaaccaataaatggctggcgaagattgccaccaaagtgatgcaggcgtttccaggtgctttccctaatgcggaagtagtgggtaacccggtgcgtaccgatgtgttggcgctgccgttgccgcagcaacgtttggctggacgtgaaggtccggttcgtgtgctggtagtgggtggttctcagggcgcacgcattcttaaccagacaatgccgcaggttgctgcgaaactgggtgatagtgtcactatctggcatcagagcggcaaaggtagccaacaatccgttgaacaggcgtatgccgaagcggggcaaccgcagcataaagtgacggaatttattgatgatatggcggcggcgtatgcgtgggcggatgtcgtcgtttgccgctccggtgcgttaacggtgagtgaaatcgccgcggcaggactaccggcgttgtttgtgccgtttcaacataaagaccgccagcaatactggaatgcgctaccgctggaaaaagcgggcgcagccaaaattatcgagcagccacagcttagcgtggatgctgtcgccaacaccctggccgggtggagccgagaaaccttattaaccatggcagaacgcgcccgcgctgcatccattccggatgccaccgagcgagtggcaaatgaagtgagccgggttgcccgggcgtaattgtagcgatgccttttgcatcgtatgaatttaagaagttaatggcgtaaagaatgaatacacaacaattggcaaaactgcgttccatcgtgcccgaaatgcgtcgcgttcggcacatacattttgtcggcattggtggtgccggtatgggcggtattgccgaagttctggccaatgaaggttatcagatcagtggttccgatttagcgccaaatccggtcacgcagcagttaatgaatctgggtgcgacgatttatttcaaccatcgcccggaaaacgtacgtgatgccagcgtggtcgttgtttccagcgcgatttctgccgataacccggaaattgtcgccgctcatgaagcgcgtattccggtgatccgtcgtgccgaaatgctggctgagttaatgcgttttcgtcatggcatcgccattgccggaacgcacggcaaaacgacaaccaccgcgatggtttccagcatctacgcagaagcggggctcgacccaaccttcgttaacggcgggctggtaaaagcggcgggggttcatgcgcgtttggggcatggtcggtacctgattgccgaagcagatgagagtgatgcaagcttcctgcatctgcaaccgatggtggcgattgtcaccaatatcgaagccgaccacatggatacctaccagggcgactttgagaatttaaaacagacttttattaattttctgcacaacctgccgttttacggtcgtgcggtgatgtgtgttgatgatccggtgatccgcgaattgttaccgcgagtggggcgtcagaccacgacttacggcttcagcgaagatgccgacgtgcgtgtagaagattatcagcagattggcccgcaggggcactttacgctgctgcgccaggacaaagagccgatgcgcgtcaccctgaatgcgccaggtcgtcataacgcgctgaacgccgcagctgcggttgcggttgctacggaagagggcattgacgacgaggctattttgcgggcgcttgaaagcttccaggggactggtcgccgttttgatttcctcggtgaattcccgctggagccagtgaatggtaaaagcggtacggcaatgctggtcgatgactacggccaccacccgacggaagtggacgccaccattaaagcggcgcgcgcaggctggccggataaaaacctggtaatgctgtttcagccgcaccgttttacccgtacgcgcgacctgtatgatgatttcgccaatgtgctgacgcaggttgataccctgttgatgctggaagtgtatccggctggcgaagcgccaattccgggagcggacagccgtagcctgtgtcgcacaattcgtggacgtgggaaaattgatcccattctggtgccggatccggcgcgggtagccgagatgctggcaccggtattaaccggtaacgacctgattctcgttcagggggctggtaatattggaaaaattgcccgttctttagctgaaatcaaactgaagccgcaaactccggaggaagaacaacatgactgataaaatcgcggtcctgttgggtgggacctccgctgagcgggaagtttctctgaattctggcgcagcggtgttagccggactgcgtgaaggcggtattgacgcgtatcctgtcgacccgaaagaagtcgacgtgacgcaactgaagagcatgggctttcagaaagtgtttatcgcgctacacggtcgcggcggtgaagatggtacgctgcaggggatgctcgagctgatgggcttgccttataccggaagcggagtgatggcatctgcgcttagtatggataaactacgcagcaaacttctatggcaaggtgccggtttaccggtcgcgccgtgggtagcgttaacccgcgcagagtttgaaaaaggcctgagcgataagcagttagcagaaatttctgctctgggtttgccggttatcgttaagccgagccgcgaaggttccagtgtgggaatgagtaaagtagtagcagaaaatgctctacaagatgcattaagattggcatttcagcacgatgaagaagtattgattgaaaaatggctaagtgggccggagttcacggttgcgatactcggtgaagaaattttaccgagtatacgtattcaaccgtccggaaccttctatgattatgaggcgaagtatctctctgatgagacacagtatttctgccccgcaggtctggaagcgagtcaagaggccaatttgcaggcattagtgctgaaagcatggacgacgttaggttgcaaaggatggggacgtattgacgttatgctggacagcgatggacagttttatctgctggaagccaataccagtccgggtatgaccagccacagcctggtgccgatggcggcacgtcaggcaggtatgagcttcagccagttggtagtacgaattctggaactggcggactaatatgagccaggctgctctgaacacgcgaaacagcgaagaagaggtttcttctcgccgcaataatggaacgcgtctggcggggatccttttcctgctgaccgttttaacgacagtgttggtgagcggctgggtcgtgttgggctggatggaagatgcgcaacgcctgccgctcagtaagctggtgttgaccggtgaacgccattacacacgtaatgacgatatccggcagagcatcctggcattgggtgagccgggtacctttatgacccaggatgtcaacatcatccagacgcaaatagaacaacgcctgccgtggattaagcaggtgagcgtcagaaagcagtggcctgatgaattgaagattcatctggttgaatatgtgccgattgcgcggtggaatgatcaacatatggtagacgcggaaggaaataccttcagcgtgccgccagaacgcaccagcaagcaggtgcttccaatgctgtatggcccggaaggcagcgccaatgaagtgttgcagggctatcgcgaaatggggcagatgctggcaaaggacagatttactctgaaggaagcggcgatgaccgcgcggcgttcctggcagttgacgctgaataacgatattaagctcaatcttggccggggcgatacgatgaaacgtttggctcgctttgtagaactttatccggttttacagcagcaggcgcaaaccgatggcaaacggattagctacgttgatttgcgttatgactctggagcggcagtaggctgggcgcccttgccgccagaggaatctactcagcaacaaaatcaggcacaggcagaacaacaatgatcaaggcgacggacagaaaactggtagtaggactggagattggtaccgcgaaggttgccgctttagtaggggaagttctgcccgacggtatggtcaatatcattggcgtgggcagctgcccgagccgtggtatggataaaggcggggtgaacgacctcgaatccgtggtcaagtgcgtacaacgcgccattgaccaggcagaattgatggcagattgtcagatctctagcgtatatctggcgctttctggtaagcacatcagctgccagaatgaaattggtatggtgcctatttctgaagaagaagtgacgcaagaagatgtggaaaacgtcgtccataccgcgaaaagcgtgcgtgtgcgcgatgagcatcgtgtgctgcatgtgatcccgcaagagtatgcgattgactatcaggaagggatcaagaatccggtaggacttagcggcgtgcggatgcaggcaaaagtgcacctgatcacatgtcacaacgatatggcgaaaaacatcgtcaaagcggttgaacgttgtgggctgaaagttgaccaactgatatttgccggactggcaagtagttatagcgtattgacggaagatgaacgtgaactgggtgtctgcgtcgtcgatatcggtggtggtacaatggatatcgccgtttataccggtggggcattgcgccacactaaggtaattccttatgctggcaatgtcgtgaccagtgatatcgcttacgcctttggcacgccgccaagcgacgccgaagcgattaaagttcgccacggttgtgcgctgggttccatcgttggaaaagatgagagcgtggaagtgccgagcgtaggtggtcgtccgccacggagtctgcaacgtcagacactggcagaggtgatcgagccgcgctataccgagctgctcaacctggtcaacgaagagatattgcagttgcaggaaaagcttcgccaacaaggggttaaacatcacctggcggcaggcattgtattaaccggtggcgcagcgcagatcgaaggtcttgcagcctgtgctcagcgcgtgtttcatacgcaagtgcgtatcggcgcgccgctgaacattaccggtttaacggattatgctcaggagccgtattatagcacggcggtgggattgcttcactatgggaaagagagtcatcttaacggtgaagctgaagtagaaaaacgtgttacagcaagtgttggcagctggatcaagcgactcaatagttggctgcgaaaagagttttaatttttatgaggccgacgatgattacggcctcaggcgacaggcacaaatcggagagaaactatgtttgaaccaatggaacttaccaatgacgcggtgattaaagtcatcggcgtcggcggcggcggcggtaatgctgttgaacacatggtgcgcgagcgcattgaaggtgttgaattcttcgcggtaaataccgatgcacaagcgctgcgtaaaacagcggttggacagacgattcaaatcggtagcggtatcaccaaaggactgggcgctggcgctaatccagaagttggccgcaatgcggctgatgaggatcgcgatgcattgcgtgcggcgctggaaggtgcagacatggtctttattgctgcgggtatgggtggtggtaccggtacaggtgcagcaccagtcgtcgctgaagtggcaaaagatttgggtatcctgaccgttgctgtcgtcactaagcctttcaactttgaaggcaagaagcgtatggcattcgcggagcaggggatcactgaactgtccaagcatgtggactctctgatcactatcccgaacgacaaactgctgaaagttctgggccgcggtatctccctgctggatgcgtttggcgcagcgaacgatgtactgaaaggcgctgtgcaaggtatcgctgaactgattactcgtccgggtttgatgaacgtggactttgcagacgtacgcaccgtaatgtctgagatgggctacgcaatgatgggttctggcgtggcgagcggtgaagaccgtgcggaagaagctgctgaaatggctatctcttctccgctgctggaagatatcgacctgtctggcgcgcgcggcgtgctggttaacatcacggcgggcttcgacctgcgtctggatgagttcgaaacggtaggtaacaccatccgtgcatttgcttccgacaacgcgactgtggttatcggtacttctcttgacccggatatgaatgacgagctgcgcgtaaccgttgttgcgacaggtatcggcatggacaaacgtcctgaaatcactctggtgaccaataagcaggttcagcagccagtgatggatcgctaccagcagcatgggatggctccgctgacccaggagcagaagccggttgctaaagtcgtgaatgacaatgcgccgcaaactgcgaaagagccggattatctggatatcccagcattcctgcgtaagcaagctgattaagaattgactggaatttgggtttcgaggctctttgtgctaaactggcccgccgaatgtatagtacacttcggttggataggtaatttggcgagataatacgatgatcaaacaaaggacacttaaacgtatcgttcaggcgacgggtgtcggtttacataccggcaagaaagtcaccctgacgttacgccctgcgccggccaacaccggggtcatctatcgtcgcaccgacttgaatccaccggtagatttcccggccgatgccaaatctgtgcgtgataccatgctctgtacgtgtctggtcaacgagcatgatgtacggattagtaccgtagagcacctcaatgctgctctcgcgggcttgggcatcgataacattgttatcgaagttaacgcgccggaaatcccgatcatggacggcagcgccgctccgtttgtatacctgctgcttgacgccggtatcgacgagttgaactgcgccaaaaaatttgttcgcatcaaagagactgttcgtgtcgaagatggcgataagtgggctgaatttaagccgtacaatggttttagcctggatttcaccatcgattttaaccatccggctattgattccagcaaccagcgctatgcgatgaacttctccgctgatgcgtttatgcgccagatcagccgtgcgcgtacgttcggtttcatgcgtgatatcgaatatctgcagtcccgtggtttgtgcctgggcggcagcttcgattgtgccatcgttgttgacgattatcgcgtactgaacgaagacggcctgcgttttgaagacgaatttgtgcgtcacaaaatgctcgatgcgatcggtgacttgttcatgtgtggtcacaatattattggtgcatttaccgcttataaatccggtcatgcactgaataacaaactgctgcaggctgtcctggcgaaacaggaagcctgggaatatgtgaccttccaggacgacgcagaactgccgttggccttcaaagcgcctagtgctgtactggcataacgacatttatactgtcgtataaaattcgactggcaaatctggcactctctccggccaggtgaaccagtcgtttttttttgaattttataagagctataaaaaacggtgcgaacgctgttttcttaagcacttttccgcacaacttatcttcattcgtgctgtggactgcaggctttaatgataagatttgtgcgctaaatacgtttgaatatgatcgggatggcaataacgtgagtggaatactgacgcgctggcgacagtttggtaaacgctacttctggccgcatctcttattagggatggttgcggcgagtttaggtttgcctgcgctcagcaacgccgccgaaccaaacgcgcccgcaaaagcgacaacccgcaaccacgagcctagtgccaaagttaactttggtcaattggccttgctggaagcgaacacacgccgcccgaatagcaactattccgttgattactggcatcaacatgccattcgcacggtaatccgtcatctttctttcgcaatggcaccgcaaacactgcccgttgctgaagaatctttgcctcttcaggcgcaacatcttgcattactggatacgctcagcgcgctgctgacccaggaaggcacgccgtctgaaaagggttatcgcattgattatgcgcattttaccccacaagcaaaattcagcacgcccgtctggataagccaggcgcaaggcatccgtgctggccctcaacgcctcacctaacaacaataaacctttacttcattttattaactccgcaacgcggggcgtttgagattttattatgctaatcaaattgttaactaaagttttcggtagtcgtaacgatcgcaccctgcgccggatgcgcaaagtggtcaacatcatcaatgccatggaaccggagatggaaaaactctccgacgaagaactgaaagggaaaaccgcagagtttcgtgcacgtctggaaaaaggcgaagtgctggaaaatctgatcccggaagctttcgccgtggtacgtgaggcaagtaagcgcgtctttggtatgcgtcacttcgacgttcagttactcggcggtatggttcttaacgaacgctgcatcgccgaaatgcgtaccggtgaaggaaaaaccctgaccgcaacgctgcctgcttacctgaacgcactaaccggtaaaggcgtgcacgtagttaccgtcaacgactacctggcgcaacgtgacgccgaaaacaaccgtccgctgtttgaattccttggcctgactgtcggtatcaacctgccgggcatgccagcaccggcaaagcgcgaagcttacgcagctgacatcacttacggtacgaacaacgaatacggctttgactacctgcgcgacaacatggcgttcagccctgaagaacgtgtacagcgtaaactgcactatgcgctggtggacgaagtggactccatcctgatcgatgaagcgcgtacaccgctgatcatttccggcccggcagaagacagcagcgaaatgtataaacgcgtgaataaaattattccgcacctgatccgtcaggaaaaagaagactccgaaaccttccagggcgaaggccacttcagcgtggacgaaaaatctcgccaggtgaacctgaccgaacgtggtctggtgctgattgaagaactgctggtgaaagagggcatcatggatgaaggggagtctctgtactctccggccaacatcatgctgatgcaccacgtaacggcggcgctgcgcgctcatgcgctgtttacccgtgacgtcgactacatcgttaaagatggtgaagttatcatcgttgacgaacacaccggtcgtaccatgcagggccgtcgctggtccgatggtctgcaccaggctgtggaagcgaaagaaggtgtgcagatccagaacgaaaaccaaacgctggctagcatcaccttccagaactacttccgtctgtatgaaaaactggcggggatgaccggtactgctgataccgaagctttcgaatttagcagtatctacaagctggataccgtcgttgttccgaccaaccgtccaatgattcgtaaagatctgccggacctggtctacatgactgaagcggaaaaaattcaggcgatcattgaagatatcaaagaacgtactgcgaaaggccagccggtgctggtgggtactatctccatcgaaaaaagcgagctggtgagtaacgaactgaccaaagccggtattaagcacaacgtcctgaacgccaaattccacgccaacgaagcggcgattgttgctcaggcaggttatccggctgcggtgactatcgcgaccaatatggcgggtcgtggtacagatattgtgctcggtggtagctggcaggcagaagttgccgcgctggaaaatccgaccgcagagcaaattgaaaaaattaaagccgactggcaggtacgtcacgatgcggtactggaagcaggtggcctgcatatcatcggtaccgagcgtcacgaatcccgtcgtatcgataaccagttgcgcggtcgttctggtcgtcagggggatgctggttcttcccgtttctacctgagcatggaagatgcgctgatgcgtatttttgcttccgaccgagtatccggcatgatgcgtaaactgggtatgaagccaggcgaagccattgaacacccgtgggtgactaaagcgattgccaacgcccagcgtaaagttgaaagccgtaacttcgacattcgtaagcaactgctggaatatgatgacgtggctaacgatcagcgtcgcgccatttactcccagcgtaacgaactgttggatgtcagcgatgtgagcgaaaccattaacagcattcgtgaagatgtgttcaaagcgaccattgatgcctacattccaccacagagcctggaagaaatgtgggatattccggggctgcaggaacgtctgaagaacgatttcgacctcgatttgccaattgccgagtggctggataaagaaccagaactgcatgaagagacgctgcgtgagcgcattctggcgcagtccatcgaagtgtatcagcgtaaagaagaagtggttggtgctgagatgatgcgtcacttcgagaaaggcgtcatgctgcaaacgcttgactccctgtggaaagagcacctggcagcgatggactatctgcgtcagggtatccacctgcgtggctacgcacagaaagatccgaagcaggaatacaaacgtgaaagcttctccatgtttgcagcgatgctggagagcttgaaatatgaagttatcagtacgctgagcaaagttcaggtacgtatgcctgaagaggttgaggagctggaacaacagcgtcgtatggaagccgagcgtttagcgcaaatgcagcagcttagccatcaggatgacgactctgcagccgcagctgcactggcggcgcaaaccggagagcgcaaagtaggacgtaacgatccttgcccgtgcggttctggtaaaaaatacaagcagtgccatggccgcctgcaataaaagctaactgttgaagtaaaaggcgcaggattctgcgccttttttataggtttaagacaatgaaaaagctgcaaattgcggtaggtattattcgcaacgagaacaatgaaatctttataacgcgtcgcgcagcagatgcgcacatggcgaataaactggagtttcccggcggtaaaattgaaatgggtgaaacgccggaacaggcggtggtgcgtgaacttcaggaagaagtcgggattaccccccaacattttagcctatttgaaaaactggaatatgaattcccggacaggcatataacactgtggttttggctggtcgaacgctgggaaggggagccgtggggtaaagaagggcaacccggtgagtggatgagcctggtcggtcttaatgccgatgattttccgccagccaatgaaccggtaattgcgaagcttaaacgtctgtaagtcagataaggcgttttcgccgcatccgacattcgcacacgatgcctgatgcgacgctggcgcgtcttatcaggcctaaagggatttctaactcattgataaatttgtttttgtaggtcggataaggcgttcacgccgcatccgacatttgcacaagatgcctgatgcgacgctgtccgcgtcttatcaggcctacgtgcggcatcagacaaatgtcactgctttggttcttcgctccagtcatcgctttcggaaagatcgccactgctggggattcgtttttcttcagcagcccattctccgaggtcgatcagctgacaacgtttggagcaaaatggccgaaacgggctgatttcaccccacaccaccgttttcccgcaggttgggcaattcaccgtaatagtttcactcatttttactccttagcaacaggccagttcgaaatccagacgttccggtacctgtccgttttcagtgtccagcggcataaaacgaatggcaaaacggctcttatgtccggaaatttgcggataaagctgactatcgaggctcagattcaggcgcagcaagtcggcatcgccaccgttatcctgataaaaaccattcaggctggtttgtttacggaagggggcgctctggcgaattaaatccagcaccatggtaagtgcctgggtgagcgggttcaggctggcaatccaggtttctacctggctgtcgcgctgcgcctggggtagatgcagccaaatgtgcaatgtaggtaaatcaaagctgcaacagccgcctgggatgctcagtcgctgacgcaccagagcaatcaaacgatcttcacgcagaaattgcccgatacgcggcgcggaaattaatacgctccccgccgcttttaactgctgaattaatgcttcaatacggctctggtccacgccaggcacgccaatccaggtctggagtttacgttgctgccggtcaagttctttcaacagctcagtgcggacttcgccgcgctcgaaaacatccagtaattcactgacattacggaagaaatgcagcgcgccagcgtggtcaacgatgggtaaattaacggtgagttgctgaatcaaaaactcaatgcgcagccatgtacgcattttttcatttagtggatgttcaaaaaggacctgggtctgcattacggtttttcctgactgacaaactggctcgcaagctgcaaatagtgtgcgtgcaggcgggcaacatcgcttgcgatagcatccggtgcgccgttattatcaatgacgtcatctgccacggcaaggcgggcttcgcgcgttgcctgagcagcaaggatttgttcgacatgctcgcgagttacatcatcgcgctgcatggtgcgcttaagttgcgtttctgggctgacatccaccacaagcactcgattcgcttttttatacagactgttttctaccagcaatggcacaacccacagtacatagggggaagtagcttgctggatctggtgttgcgtctcttgctgaatcagcggatgcagcagggcgttaagccagtttttctcttccgggttggcgaagatccgctcgcgcaaggcccggcgctgcaatgttccatcagcagcaatcatgttagcgccaaagtgatcagcaatggcatgtagcgcaggtgcacctggttcaaccacctgacgcgcaataatatcggcatcaatgacgttaattccgagatcagcaaacgcattggcaacggtactcttgccactgccaatgcctcccgttaaggcaactatatacctcataatttatattcccgggaattcatcatgattatcaaaacgttaaaaatgagtgcacgaaagcgaaattgatgaaacgttcgctcactatttaccaggtaaatttatgggattgtagcgtaaaaaaagacaatttcgcagtcttgcgccgcattgattagtgcgtatgatagcgtcactggagttgcgctcttacccttatagccattaaccccaggaatccgcacatgcgtattgaagaagatctgaagttaggttttaaagacgttctcatccgccctaaacgctccactcttaaaagccgttccgatgttgaactggaacgtcaattcaccttcaaacatagtggtcagagctggtccggcgtgccgattatcgccgcaaatatggacaccgtaggcacattttctatggcctctgcgctggcttcttttgatattttgactgctgtgcataaacactattctgtcgaagagtggcaagcgtttatcaacaattcttccgctgatgtgctgaaacatgtgatggtttctaccggtacgtctgatgcggatttcgaaaaaactaaacagattctcgacctgaacccggcattaaacttcgtttgtattgacgtggcgaatggttattccgaacacttcgtgcagttcgttgcgaaagcgcgtgaagcgtggccgaccaaaaccatttgtgctggtaacgtagtgactggtgaaatgtgtgaggagcttatcctcagtggtgccgatatcgttaaagttggcattggcccaggttctgtttgtacaactcgcgtcaaaacaggcgtcggttatccgcaactttctgcggtaatcgaatgtgccgatgctgcgcacggtctgggcggaatgatcgtcagcgatggtggctgcaccacgccgggcgatgtggcgaaagcctttggcggcggtgccgatttcgtcatgcttggcggcatgctggcgggccacgaagagagcggcggtcgcatcgttgaggagaacggcgagaaatttatgctgttctacggcatgagctccgagtctgcgatgaaacgtcacgttggcggcgttgcggaatatcgcgcagcagaaggtaaaaccgttaagctgccgctgcgaggcccggttgaaaataccgcgcgagatattttgggcggcctgcgtagtgcttgtacatacgttggggctagtcgcctgaaagagctgaccaagcgcaccacgtttattcgtgtgcaggaacaagaaaaccgcatcttcaacaacctgtaatctcccaacgctggcgtggagcaacacgccagcgttatcccatcccactcatcgcatcgcctaaatggaaaattggcagatacattgccaccaccagcgtaccaataattcctcccgttatgatcagcaacgccggttccagtaaggctgcgaggttatccgccagcgccattgtgttttcccgatgatgatgggcgaggttgtctaacatgagatccagagagccggatgcctctcctgttctcactaattgcaaacagagcgggctaaactcaccggtattttttagcgccagccagatgggttgaccgttactgatatcgtgctggatttgtgtcagaagttgcacccagtacgggcagcgcattgtttctctgacgctctctacgccctgtaaaaaagtaatgcctgcactttgtgtcagcgccagaatcgtaaagatctgcgtgagtttttgtccccgcatcagactacccataatcgggatgcgtaacagcaatttctgccgcactataagccaggtcggtcggcgcatcagcaacttattggctatcgccagcagaaagccgaacaacaccagcagccagctccattcgccactaaagtctgccagcgtcatgatcccctgcgttagtgccggtagtggggtgttgaaggtcttatagatagcggcaaactccggcagaacaaaatgcagcattgccacaaccaccatgattgccatcgctaaaatgatgatgggataacgtaacgcacttttcactttgtcggtcaactgacgctgggctttttgctgacgcgccagttcaaagcagcattcatccagcttaccggtcagttcacccgtgcggatcatcgcctgatagagcggcggaaatacctcactccagggtaataaggcattggaaaaagcaatgccctgttcgagatcgtgcgccaggctttgcagcaacgcttgccattgcttactgggatgctgttccgccagcagagccagcccttcagaaagcgttaaccctgctttgagtagcgtcgccagttgatgaatgacttccgcgcttttatctcctcgccactgcgcagaattgatggcgattcgcttcaggcttagtggggtaaccatctgttgctgtagtgccataagcagtaaagtacggctctctgcccatagcatcccatcttgcgcattgccgtcgccggttatgccatgccagcgccagagttgcttactcgccatgcggcatcctcagtacgcggattaactcttcaaaggtggttaagccttgctctacggccaggcagccgttttcaaaaagcgtacgcatacccgcctgtcgtgcgtgcgtttccaggctttcaacgtcggtattagcggaaataagctgacgaatgaccggcgttatgggcagaacttcaaataaggccgtacgaccataaaaaccgtggtagcaatgtacacaaccgggtgcctgccagtggggcagcgggcttggccatacattgtctggaatgtggatgggctccccttgctgccggcgacaatgtgggcaaagtttgcgtaccagacgctgggctattaccagcgtaagcgcgctacttagcatccagcgggcgacccccatttgctgtaaacgtaccagcgtttcgcaggtggaattagtgtgtagggtagacaacaccaggtgaccagtttgcgccgctttaatagcgatctctgctgtttcgccatcgcggatctctccgatcatgatgacgtcaggatcctggcgcaataacgcacgcaaaacgccctgaaaggtgagtccggcacgcggatggatttgcgtctggtttagtccggctatggggatctcaactggatcttcgacgctacaaatattaatgtcagcggtattcagcttttgcagggcactataaagcgtgaccgttttgccgctgccggtagggccagttaccagcaccagtccctgtggttgttgcaaggcatgagcaaagtccgccagttgtaacggctgcattccaagcgtgttgacatccagtgcctgacccacctgctgtaacaaccttaataccaccttttcaccaccccgacatggtaaggtcgcaatacgaaaactgacggcgtttcctgccagttcgacagtgaattgcccgtcctgcggcaggcgatgttccgcaatatccaggtttcccagcacttttaatctggcggttaatgcgactccggcatccggactaacatccggtaaaggatgcaatacgccgtcgatacgcaagcggatgcggtaggcattgtccgctggttcgatatgaatatcagacgcgcgttgttccagcgcagattgtaacgttcgagttagcaactctgctttgggctgatgcttctcctgaacagctacgggcagtgtctgttgtgtgcgactggcgtgaccttccatttgttggcgcgtccagcaggtgatctcaatacgtttggtggtagcgaaatgcaatgcgtccagtagctcatggctaggtgcatcgactaccgcaacatgaaccacctcttcgctggcatccagcaagactccatgataacgcagacacagggcagtgagctgtggaatattcattgccgctccttagttggcgtcatcaaagcggaagacatcttcgcaggcttgctgcaatgcgctgtcactttgaatattgcagttgcgcgtccagccggtgacgccgtttgcgttatcccaacccggtgtcatgacgacgcttagcccattgagactttcttgcccggtcaggctcaccacgccctttgccacactcatggcactaacatagcgggtggtggtagggctgggaatgccattgctgccaccgtcgcaggtatctaatccaccatgttccagcgcgcacaactctacggcggtacggtaaggcacaaaggtttgtagcatgtcggtgagtgcggctttgcgcaggtagttttgataagcgggaataccaatggcgcttaaaatggcaatgatgccaataaccaccatcagttcgataagtgtaaaaccgcgttgcttgtccatctgtttcgctccttgatttggttggcgctactttggcaaacgccatcagcacaggcgaggggcaaaaaacgaaacgggaaagcagattccgaggttttttatttcgttgcagcgaaagacaagaaatttgcgaggcgttacgaagaaagttggggaaggggagattatccgcccgcgatggagcggataaatctgtcaactattagcgaaaacgcatactaaggtcgagtgcttgtacgtgtttagttagcgcaccgacggagataaagtccacgcccgtttcggcaaattcacgcagtgttttgtcagtgacgttgccagacacttccagtagcgccttgccgttggtgcgtttgacggcttcgcgcatctgttctgtttcgaagttatccagcatgatgatatcggctcctgctttcagggcttcatcaagttcttccagattctctacttcgacttctactggcgcatccgggtgcagccaggacgctttttcgaccgcctggcgcacactgccggaggcaataatatggttttctttgatcaggaaggcatcagaaagccccagacggtgattcgctccgccgccgcaaagtaccgcgtatttcagagcactacgcaggccgggtaaggttttgcgcgtatccaacaactgcgtgttggtgccttccagcaattcgacatagtggcgtaccttactggcaactccactaagggtttgcacaaaattaagcgcagtgcgttcgcccgttaacagcacgcgggatgggccttcaagttcgaacaaggattgattggcattgatgacatcgccgtcatccacatgccagattatggtgacatcgtcgcctgccagttgaataaacacctcttcaacccagcgtttgccgcaaaagacgccattctcgcgggtgatcaccgtggcatgagagcgagaattttccggtaaaagttttgccgtaatatcattgttggcatcgactgttccgcctaaatcttcccgcagcgcctgggccaccgcgccggggatatcgagattaatgcgttccagcagctcgtcacgtcgggtgtcagggttatagcggcgaggcggcatgttaaaactccagatagctaacgaatcataaggtagaaacatgctactctgaaccgggtattagcaccacatataaggagatcctgcatgttgttagaacaggggtggctggttggcgcgcgccgcgttcccagtccacattacgattgccgcccggatgacgaaacacccaccctgctggtggtgcacaatattagcctgccgccaggcgagtttggcggtccgtggatcgacgcattattcactggaactattgatccgcaggcacatcctttctttgctgagatcgcccatttgcgcgtctccgctcactgtttgattcgccgtgatggtgaaatagtccagtatgttcctttcgataaacgtgcatggcatgcgggagcctctcagtatcaggggcgcgaacgctgcaatgatttttctattgggattgagcttgaaggcaccgatacgctggcgtataccgatgcgcagtatcaacagcttgcggcggttacgcgggcactgattgattgctatccggatatcgctaaaaacatgacgggccattgtgatattgcgccggatcggaaaaccgatcccggtcctgcatttgattgggcacggtttcgtgtgctggtcagcaaggagacaacatgacgctatttacaaccttactggtgttaattttcgagcgcctgtttaagttgggcgagcactggcagcttgatcatcgtcttgaagcgttctttcggcgggtgaaacatttttctctcgggcgcacgttaggcatgaccattattgcgatgggcgtgacttttttactgttacgcgcattgcagggagtattgttcaacgttcccacgctactggtgtggctgctgattggtttgctgtgtattggcgcaggtaaagttcgtcttcattatcatgcttatctgacagctgctagtcgtaatgatagccatgcccgtgccacgatggctggcgaactcaccatgattcacggcgtcccggcaggctgcgacgaacgtgagtatttgcgtgagctgcaaaatgcattgctgtggattaactttcgtttttatcttgcaccgctgttctggctgattgtggggggaacctggggacccgttacgctgatggggtatgcgtttttgcgtgcatggcaatactggctggcgcgatatcagacgccgcatcatcgtttacagtccggcattgatgccgtgcttcatgtactggattgggtgccggttcgtcttgcgggtgtggtatatgccttgatcggtcatggtgagaaagcgttaccggcctggtttgctagcctgggtgatttccatactagccagtatcaggtgttaacgcgtctggcgcagttctctctggcgcgtgaaccgcatgtcgataaggtggagacgccgaaggcagcggttagtatggcgaagaaaaccagcttcgtggtcgtggtggtgattgcactactgacgatttacggggcgttggtgtaaagattattgccctcaccctgtacgggtgagggcgtagagagattaatgcgcttttacggctttggcggttttctctttaaacagatagccgatacctaacacgatcagccataccgggatcaggtatacgctaatcgccattcctggggtcatcagcataatcaccagtaccgccgccataaacagcaggcagatccagttacccagcggataaagcagagcagggaagcgagttaccacgccttgttcctgcttggcgcgacggaatttcatatgcgccaggctaatcatcgcccagttgattaccagtgcagataccaccagcgccattaacagtccgaaagcggactctggggcaaggtagttaatcagtacgcacaacgccgttaccagtgcagacaccagaatggtatttactggtacaccacgtttatcgacagacgccagcgcttttggcgcattaccctgttgtgccagaccaaacagcatacggctgttgcaatatacgcagctgttgtacacggagagcgccgcagtcagtaccacgatgttcagcgcattcgccacaaaggtatcgcctaactcgtggaagatcagcacaaacggactggtatcggcggtaacgcgggtccacggcatcagactgagcagaacggctaagctaccaatatagaaaatcaggatgcggtagataacctggttagttgctttcggtatactttgctccgggttatcagcttctgctgcggtgatccccaccagttccagaccaccgaagctgaacatgataatcgccatcatcatcaccagcccggtgaagccgtgcggcaggaaaccaccctgatcccacaggttgctaacggtcgcctgcgggccgccgttgccactgaatagcagccagccgccgaagatgatcatcgctaccaccgcgataactttgataatggcaaaccagaactccatctcgccaaacactttaacgttggtcaggttgatggcgttaatcaccacaaagaatacggcggcagaaacccaggtggggatttccggataccagaactgaatgtatttacccacggcagtcagctcagccatggcaactaaaacgtacagtacccagtagttccagccagaggcgaaaccggcaaaactgccccagtatttataagcaaagtggctaaaggagcctgcgacaggttcttcgaccaccatttcacccagctgacgcatgatcagaaaggcgataaaaccagcaatggcgtaacccaggataatccctggccctgcggactgtattacggaggcgctacccaggaataacccggtccctatcgcgccacccagcgcgataagctgaatatggcggtttttaaggccgcgctttagctgctcgccgtgctgttgaccttccatcatgaaacctcgtgcggtggttgtttttttgatctacgcagtgatgcgtgtgtaagtttgcaattccgtttgttgtattaatttgtttacatcaaagaagtttgaattgttacaaaaagacttccgtcagatcaagaataatggtatgcggcagcgaatgcacccgctttatgcatggttgaagatgagttgcttaaaaagaaaccgtttgtaaagctcagcctcaacccctctcaatatgtagaatgaatttaaattcgttttaattgaattaaaaatcacaaaattggtaagtgaatcggttcaattcggatttttatagtttaataatcgttaaaaaactcctttcctacgtaaagtctacatttgtgcatagttacaactttgaaacgttatatatgtcaagttgttaaaatgtgcacagtttcatgatttcaatcaaaacctgtatggacataaggtgaatactttgttactttagcgtcacagacatgaaattggtaagaccaattgacttcggcaagtggcttaagacaggaactcatggcctacagcaaaatccgccaaccaaaactctccgatgtgattgagcagcaactggagtttttgatcctcgaaggcactctccgcccgggcgaaaaactcccaccggaacgcgaactggcaaaacagtttgacgtctcccgtccctccttgcgtgaggcgattcaacgtctcgaagcgaagggcttgttgcttcgtcgccagggtggcggcacttttgtccagagcagcctatggcaaagcttcagcgatccgctggtggagctgctctccgaccatcctgagagtcagtatgacttgctcgaaacacgacacgccctggaaggtatcgccgcttattacgccgcgctgcgtagtaccgatgaagacaaggaacgcatccgtgaactccaccacgccatagagctggcgcagcagtctggcgatctggacgcggaaagtaacgccgtactccagtatcagattgccgtcaccgaagcggcccacaatgtggttctgcttcatctgctaaggtgtatggagccgatgttggcccagaatgtccgccagaacttcgaattgctctatagccgtcgcgagatgctgccgctggtgagtagtcaccgcacccgcatatttgaagcgattatggccggtaagccggaagaagcgcgcgaagcaagccatcgccatctggcctttatcgaagaaattttgctcgacagaagtcgtgaagagagccgccgtgagcgttctctgcgtcgtctggagcaacgaaagaattaatgatttttctggtaaaaattatccagaagatgttgtaaatcaagcgcatataaaagcgcggcaactaaacgtagaacctgtcttattgagctttccggcgagagttcaatgggacaggttccagaaaactcaacgttattagatagataaggaataacccatgagtgaacgtttcccaaatgacgtggatccgatcgaaactcgcgactggctccaggcgatcgaaagcgtcatccgtgaagaaggtgttgagcgtgctcagtatctgatcgaccaactgcttgctgaagcccgcaaaggcggtgtaaacgtagccgcaggcacaggtatcagcaactacatcaacaccatccccgttgaagaacaaccggagtatccgggtaatctggaactggaacgccgtattcgtagtgctatccgctggaacgccatcatgacggtgctgcgtgcgagcaaaaaagacctcgaactgggcggccatatggcgtccttccagtcttccgcaaccatttatgatgtgtgctttaaccacttcttccgtgcacgcaacgagcaggatggcggcgacctggtttacttccagggccacatctccccgggcgtgtacgctcgtgctttcctggaaggtcgtctgactcaggagcagctggataacttccgtcaggaagttcacggcaatggcctctcttcctatccgcacccgaaactgatgccggaattctggcagttcccgaccgtatctatgggtctgggtccgattggtgctatttaccaggctaaattcctgaaatatctggaacaccgtggcctgaaagatacctctaaacaaaccgtttacgcgttcctcggtgacggtgaaatggacgaaccggaatccaaaggtgcgatcaccatcgctacccgtgaaaaactggataacctggtcttcgttatcaactgtaacctgcagcgtcttgacggcccggtcaccggtaacggcaagatcatcaacgaactggaaggcatcttcgaaggtgctggctggaacgtgatcaaagtgatgtggggtagccgttgggatgaactgctgcgtaaggataccagcggtaaactgatccagctgatgaacgaaaccgttgacggcgactaccagaccttcaaaagcaaagatggtgcgtacgttcgtgaacacttcttcggtaaatatcctgaaaccgcagcactggttgcagactggactgacgagcagatctgggcactgaaccgtggtggtcacgatccgaagaaaatctacgctgcattcaagaaagcgcaggaaaccaaaggcaaagcgacagtaatccttgctcataccattaaaggttacggcatgggcgacgcggctgaaggtaaaaacatcgcgcaccaggttaagaaaatgaacatggacggtgtgcgtcatatccgcgaccgtttcaatgtgccggtgtctgatgcagatatcgaaaaactgccgtacatcaccttcccggaaggttctgaagagcatacctatctgcacgctcagcgtcagaaactgcacggttatctgccaagccgtcagccgaacttcaccgagaagcttgagctgccgagcctgcaagacttcggcgcgctgttggaagagcagagcaaagagatctctaccactatcgctttcgttcgtgctctgaacgtgatgctgaagaacaagagcatcaaagatcgtctggtaccgatcatcgccgacgaagcgcgtactttcggtatggaaggtctgttccgtcagattggtatttacagcccgaacggtcagcagtacaccccgcaggaccgcgagcaggttgcttactataaagaagacgagaaaggtcagattctgcaggaagggatcaacgagctgggcgcaggttgttcctggctggcagcggcgacctcttacagcaccaacaatctgccgatgatcccgttctacatctattacagcatgttcggcttccagcgtattggcgatctgtgctgggcggctggcgaccagcaagcgcgtggcttcctgatcggcggtacttccggtcgtaccaccctgaacggcgaaggtctgcagcacgaagatggtcacagccacattcagagcctgactatcccgaactgtatctcttacgacccggcttacgcttacgaagttgctgtcatcatgcatgacggtctggagcgtatgtacggtgaaaaacaagagaacgtttactactacatcactacgctgaacgaaaactaccacatgccggcaatgccggaaggtgctgaggaaggtatccgtaaaggtatctacaaactcgaaactattgaaggtagcaaaggtaaagttcagctgctcggctccggttctatcctgcgtcacgtccgtgaagcagctgagatcctggcgaaagattacggcgtaggttctgacgtttatagcgtgacctccttcaccgagctggcgcgtgatggtcaggattgtgaacgctggaacatgctgcacccgctggaaactccgcgcgttccgtatatcgctcaggtgatgaacgacgctccggcagtggcatctaccgactatatgaaactgttcgctgagcaggtccgtacttacgtaccggctgacgactaccgcgtactgggtactgatggcttcggtcgttccgacagccgtgagaacctgcgtcaccacttcgaagttgatgcttcttatgtcgtggttgcggcgctgggcgaactggctaaacgtggcgaaatcgataagaaagtggttgctgacgcaatcgccaaattcaacatcgatgcagataaagttaacccgcgtctggcgtaagaggtaaaagaataatggctatcgaaatcaaagtaccggacatcggggctgatgaagttgaaatcaccgagatcctggtcaaagtgggcgacaaagttgaagccgaacagagcctgatcaccgtagaaggcgacaaagcctctatggaagttccgtctccgcaggcgggtatcgttaaagagatcaaagtctctgttggcgataaaacccagaccggcgcactgattatgattttcgattccgccgacggtgcagcagacgctgcacctgctcaggcagaagagaagaaagaagcagctccggcagcagcaccagcggctgcggcggcaaaagacgttaacgttccggatatcggcagcgacgaagttgaagtgaccgaaatcctggtgaaagttggcgataaagttgaagctgaacagagcctgatcaccgtagaaggcgacaaggcttctatggaagttccggctccgtttgctggcaccgtgaaagagatcaaagtgaacgtgggtgacaaagtgtctaccggcagcctgattatggtcttcgaagtcgcgggtgaagcaggcgcggcagctccggccgctaaacaggaagcagctccggcagcggcccctgcaccagcggctggcgtgaaagaagttaacgttccggatatcggcggtgacgaagttgaagtgactgaagtgatggtgaaagtgggcgacaaagttgccgctgaacagagtctgatcaccgtagaaggcgacaaagcttctatggaagttccggcgccgtttgcaggcgtcgtgaaggaactgaaagtcaacgttggcgataaagtgaaaactggcagcctgattatgatcttcgaagttgaaggcgcagcgcctgcggcagctcctgcgaaacaggaagcggcagcgccggcaccggcagcaaaagctgaagccccggcagcagcaccagctgcgaaagcggaaggcaaatctgaatttgctgaaaacgacgcttatgttcacgcgactccgctgatccgccgtctggcacgcgagtttggtgttaaccttgcgaaagtgaagggcactggccgtaaaggtcgtatcctgcgcgaagacgttcaggcttacgtgaaagaagctatcaaacgtgcagaagcagctccggcagcgactggcggtggtatccctggcatgctgccgtggccgaaggtggacttcagcaagtttggtgaaatcgaagaagtggaactgggccgcatccagaaaatctctggtgcgaacctgagccgtaactgggtaatgatcccgcatgttactcacttcgacaaaaccgatatcaccgagttggaagcgttccgtaaacagcagaacgaagaagcggcgaaacgtaagctggatgtgaagatcaccccggttgtcttcatcatgaaagccgttgctgcagctcttgagcagatgcctcgcttcaatagtagcctgagcgaagacggtcagcgtctgaccctgaagaaatacatcaacatcggtgtggcggtggataccccgaacggtctggttgttccggtattcaaagacgtcaacaagaaaggcatcatcgagctgtctcgcgagctgatgactatttctaagaaagcgcgtgacggtaagctgactgcgggcgaaatgcagggcggttgcttcaccatctccagcatcggcggcctgggtactacccacttcgcgccgattgtgaacgcgccggaagtggctatcctcggcgtttccaagtccgcgatggagccggtgtggaatggtaaagagttcgtgccgcgtctgatgctgccgatttctctctccttcgaccaccgcgtgatcgacggtgctgatggtgcccgtttcattaccatcattaacaacacgctgtctgacattcgccgtctggtgatgtaagtaaaagagccggcccaacggccggcttttttctggtaatctcatgaatgtattgaggttattagcgaatagacaaatcggttgccgtttgttgtttaaaaattgttaacaattttgtaaaataccgacggatagaacgacccggtggtggttagggtattacttcacataccctatggatttctgggtgcagcaaggtagcaagcgccagaatccccaggagcttacataagtaagtgactggggtgagggcgtgaagctaacgccgctgcggcctgaaagacgacgggtatgaccgccggagataaatatatagaggtcatgatgagtactgaaatcaaaactcaggtcgtggtacttggggcaggccccgcaggttactccgctgccttccgttgcgctgatttaggtctggaaaccgtaatcgtagaacgttacaacacccttggcggtgtttgcctgaacgtcggctgtatcccttctaaagcactgctgcacgtagcaaaagttatcgaagaagccaaagcgctggctgaacacggtatcgtcttcggcgaaccgaaaaccgatatcgacaagattcgtacctggaaagagaaagtgatcaatcagctgaccggtggtctggctggtatggcgaaaggccgcaaagtcaaagtggtcaacggtctgggtaaattcaccggggctaacaccctggaagttgaaggtgagaacggcaaaaccgtgatcaacttcgacaacgcgatcattgcagcgggttctcgcccgatccaactgccgtttattccgcatgaagatccgcgtatctgggactccactgacgcgctggaactgaaagaagtaccagaacgcctgctggtaatgggtggcggtatcatcggtctggaaatgggcaccgtttaccacgcgctgggtagtcagattgacgtggttgaaatgttcgaccaggttatcccggcagctgacaaagacatcgttaaagtcttcaccaagcgtatcagcaagaaattcaacctgatgctggaaaccaaagttaccgccgttgaagcgaaagaagacggcatttatgtgacgatggaaggcaaaaaagcacccgctgaaccgcagcgttacgacgccgtgctggtagcgattggtcgtgtgccgaacggtaaaaacctcgacgcaggcaaagcaggcgtggaagttgacgaccgtggtttcatccgcgttgacaaacagctgcgtaccaacgtaccgcacatctttgctatcggcgatatcgtcggtcaaccgatgctggcacacaaaggtgttcacgaaggtcacgttgccgctgaagttatcgccggtaagaaacactacttcgatccgaaagttatcccgtccatcgcctataccgaaccagaagttgcatgggtgggtctgactgagaaagaagcgaaagagaaaggcatcagctatgaaaccgccaccttcccgtgggctgcttctggtcgtgctatcgcttccgactgcgcagacggtatgaccaagctgattttcgacaaagaatctcaccgtgtgatcggtggtgcgattgtcggtactaacggcggcgagctgctgggtgaaatcggcctggcaatcgaaatgggttgtgatgctgaagacatcgcactgaccatccacgcgcacccgactctgcacgagtctgtgggcctggcggcagaagtgttcgaaggtagcattaccgacctgccgaacccgaaagcgaagaagaagtaatttttcgtttgccggaacatccggcaattaaaaaagcggctaaccacgccgctttttttacgtctgcaatttacctttccagtcttcttgctccacgttcagagagacgttcgcatactgcactccgttgctcgttattcagcctgacagtatggttactgtcgtttagacgttgtgggcggctctcctgaactttctcccgaaaaacctgacgttgttcaggacttgcgctttgaacacgctggcgggcgttatcacgttgctgttgattcagtgggcgctgctgtactttttccttaaacacctggcgctgctctggacttgcggactgaatacgctcacgcgctgcgtctcttcgctgctggttctgcgggttagtctgcattttctcgcgaaccgcctggcgctgctcagggctggcggactgaatgcgctcacgcgctgcctctcttcgctgctggatcttcgggttagtctgcattctctcgcgaactgcctggcgctgctcagggctggcggactgataacgctgacgagcggcgtccttttgttgctgggtcagtggttggcgacggctgaagtcgtggaagtcgtcatagctcccatagtgttcagcttcattaaaccgctgtgccgctgcctgacgttgggtatctcgtgtaatgactggtgcggcgtgtgttcgttgctgaaactgatttgctgccgcctgacgctggctgtcgcgcgttggggcaggtaattgcgtggcgctcattccgccgttgacatcggtttgatgaaaccgctttgccatatcctgatcatgatagggcacaccattacggtagtttggattgtgccgccatgccatattcttatcagtaagatgctcaccggtgatacggttgaaattgttgacgtcgatattgatgttgtcgccgttgtgttgccagccattaccgtcacgatgaccgccatcgtggtgatgataatcatcattgtcatgatgatgatggtcatgatcgtcgtcgtcccagtcgatgctgctgaatagtgcgtacgtggtagcaacgcccatgctatagccgaatccgcgtacaaagctgtcaacaaacggttctccggctggtggtggcagataaaccggcggatacgcagtattggcccagttcccgtaaaccacggttgggttgtagttgggaatatagaccacatcaggattggcgggctcaatggaaatgacggttgttgccggctctgtaatgacggggttggcagttaaaactgtattggatggtatgacgggtgccgtgactgtctgttttaccggtacagctttcttcgttgtggtaataactttctgttcggtactactcttcaggctgccggtttgttgcgccagttgccgcaatcgctgtacgctgtccatcacgtcctgcggctgggccagaaaagcatcgcccaggttttgcacccattgcgggttttcgcccatcaatgccatcaattgtggaaaggccaccagacttttaacgctggcgtcccacggctggtcagataccgcctgaatagcagcatcgccttgtttaagtggattatcgtggctccattgcactgcttgagcaacgtttgtcggataggtacttgccatcagcacctggctaagtagggcgtcgggatacagcgcgacgggcgcgacccattgatctatttgtgcagtgctgaatgcggatttgacgacggcgggtgttacgggaggtgcggaaaccgttgcaggaaacgtaaccgcggcagcgtcagacacagccagttgtgtgctttgcggttccacaggcgcttccactgtgcggctttttatatatagcccggtagaggcggcacaaagcccggcactgcaaattagcgccagcacatggggtttaaacggcaaagtcattttcataattcggatctcaaggaaatcgcaatggtcggcgaactgccacccgcaggtgctgtgaatccgagtataaagaggcggtagtttaaattttgactaatcttgggattcgttgagaaaggtgattatcaccatgcgaattaacgaagtttttacggagggaaacaatctctagaccatccttaacgattcagccacttttttatgttgcttttttgtaaacagattaacacctcgtcaaaatcctgctattctgcccgttgcggtactgggcatttaccctacaaactgctgtctcacaggagcgtgaagagaatcgcctgccgcactatgacaatgagagcgaggagaaccgtcgtgctagaagaataccgtaagcacgtagctgagcgtgccgctgaggggattgcgcccaaacccctggatgcaaaccaaatggccgcacttgtagagctgctgaaaaacccgcccgcgggcgaagaagaattcctgttagatctgttaaccaaccgtgttcccccaggcgtcgatgaagccgcctatgtcaaagcaggcttcctggctgctatcgcgaaaggcgaagccaaatcccctctgctgactccggaaaaagccatcgaactgctgggcaccatgcagggtggttacaacattcatccgctgatcgacgcgctggatgatgccaaactggcacctattgctgccaaagcactttctcacacgctgctgatgttcgataacttctatgacgtagaagagaaagcgaaagcaggcaacgaatatgcgaagcaggttatgcagtcctgggcggatgccgaatggttcctgaatcgcccggcgctggctgaaaaactgaccgttactgtcttcaaagtcactggcgaaactaacaccgatgacctttctccggcaccggatgcgtggagtcgcccggatatcccactgcacgcgctggcgatgctgaaaaacgcccgtgaaggtattgagccagaccagcctggtgttgttggtccgatcaagcaaatcgaagctctgcaacagaaaggtttcccgctggcgtacgtcggtgacgttgtgggtacgggttctagccgtaaatccgccactaactccgttctgtggtttatgggcgatgatattccacatgtgccgaacaaacgcggcggtggtttgtgcctcggcggtaaaattgcacccatcttctttaacacgatggaagacgcgggtgcactgccaatcgaagtcgacgtctctaacctgaacatgggcgacgtgattgacgtttacccgtacaaaggtgaagtgcgtaaccacgaaaccggcgaactgctggcgaccttcgaactgaaaaccgacgtgctgattgatgaagtgcgtgctggtggccgtattccgctgattatcgggcgtggcctgaccaccaaagcgcgtgaagcacttggtctgccgcacagtgatgtgttccgtcaggcgaaagatgtcgctgagagcgatcgcggcttcagcctggcgcaaaaaatggtaggccgtgcctgtggcgtgaaaggcattcgtccgggcgcgtactgtgaaccgaaaatgacttctgtaggttcccaggacaccaccggcccgatgacccgtgatgaactgaaagacctggcgtgcctgggcttcagcgctgacctggtgatgcagtctttctgccacaccgcggcgtatccgaagccagttgacgtgaacacgcaccacacgctgccggacttcattatgaaccgtggcggtgtgagcctgcgtccgggtgacggcgtcattcactcctggctgaaccgtatgctgctgccggataccgtcggtaccggtggtgactcccatacccgtttcccgatcggtatctctttcccggcgggttctggtctggtggcgtttgctgccgcaactggcgtaatgccgcttgatatgccggaatccgttctggtgcgcttcaaaggcaaaatgcagccgggcatcaccctgcgcgatctggtacacgctattccgctgtatgcgatcaaacaaggtctgctgaccgttgagaagaaaggcaagaaaaacatcttctctggccgcatcctggaaattgaaggtctgccggatctgaaagttgagcaggcctttgagctaaccgatgcgtccgccgagcgttctgccgctggttgtaccatcaagctgaacaaagaaccgatcatcgaatacctgaactctaacatcgtcctgctgaagtggatgatcgcggaaggttacggcgatcgtcgtaccctggaacgtcgtattcagggcatggaaaaatggctggcgaatcctgagctgctggaagccgatgcagatgcggaatacgcggcagtgatcgacatcgatctggcggatattaaagagccaatcctgtgtgctccgaacgacccggatgacgcgcgtccgctgtctgcggtacagggtgagaagatcgacgaagtgtttatcggttcctgcatgaccaacatcggtcacttccgtgctgcgggtaaactgctggatgcgcataaaggtcagttgccgacccgcctgtgggtggcaccgccaacccgtatggacgccgcacagttgaccgaagaaggctactacagcgtcttcggtaagagtggtgcgcgtatcgagatccctggctgttccctgtgtatgggtaaccaggcgcgtgtggcggacggtgcaacggtggtttccacctctacccgtaacttcccgaaccgtctgggtactggcgcgaatgtcttcctggcttctgcggaactggcggctgttgcggcgctgattggcaaactgccgacgccggaagagtaccagacctacgtggcgcaggtagataaaacagccgttgatacttaccgttatctgaacttcaaccagctttctcagtacaccgagaaagccgatggggtgattttccagactgcggtttaaaaagtcagcgcacgcgctgcgcataaacgacacaatgcccggtgaatgagattcccgggcatttttttatttctaaaccatcgccgttccgctgtttttctccggtaaggctgcgataattacatcaatggcgcaatgcgatttcggtgcattgccgggagcagaggaacacactatggattacgaatttctgcgcgatattaccggagtggtaaaggtgcgtatgtccatggggcatgaagtggtcgggcactggtttaatgaagaggtgaaagaaaacctggccttgcttgatgaagtggaacaagcagcgcacgcactgaaaggtagcgaacggtcctggcaacgggcagggcatgaatacaccctgtggatggacggtgaagaggtgatggttcgcgccaatcaactggaattcgctggcgatgaaatggaagaggggatgaactactacgacgaagaaagcctgagcctatgcggcgttgaggattttctgcaggtcgtggcggcttaccgcaatttcgtgcagcagaagtaaataaatctggcggagcctgggagctccgccagagccgttaaacagctggcatattgcgcccgtaataaatctcgcgcatttctttccacagcgcagcggtaatttcctggcgctcgctgtcggttaagtcttccggtttggtgtggaacatgtagtgcttaaggtcgaactctttaagcaacatcttggtatggaagatattttcctgatagacgttcacatccaccatgtcatacagcgccttcatatcgtcagacataaagttctgaatgctattaatctcatggtcgataaagtgcttcataccgttaatgtcgcgggtaaaaccgcgcacgcgataatcaatggttacgatatcggactcaagctggtggatcaggtaattcagcgccttcagcggagaaatcacgccgcaggtagagacttcaatatcggcgcggaaggtacataaaccgccttcaggatgactttccgggtaggtatgtacgcaaatatgacttttatcaagatgggcaacgaccgtttctggcagtgggccggggtgttctgttttgtcgatgagtttcgggtcaaccggttcttcactcaccagaatagtgacgctggcaccctgtggttcgtaatcctggcgggcgatgttaagaatattagccccgataatggaacaggtttcactcaggatttcggtcagacggttggcattatagagttcatcgatataagcaatataaccgtcgcgctcttcggcagttttggcgtagcagatatcgtaaatacaaaaactcagacttttggtcagattattaaagccatgcagtttcagttttttcaatttcttatcttctccttaggacggctgactagccagtgcgtcttgcagatactgaggtaaggcaaaagctgccgtatggattgccggattgtaataacggcatttcaggccagaggcgagaaaacgcgcctgaataatttcggtactgagatggcgtaaggcgtcgttatctgtcgcccatgcaaaagtcatgataccgccgtaataggtcgggatcgccgcctgataaaagccaacgtcgctgaagtaatggctgagtttgcgatggctgtcgatggcttcttcctgctgtaaaaagcagacgccgttttgtgcgacgaagataccgccaggattcaggcaacgtttgcagccttcataaaatgcgctagtgaaaaggctttcgccgggaccgataggatcggtgcagtcggagataatgacatcaaaggtctggctggtttgattaacgaaattgacgccatcgtcgatcaccagcttaaagcgcggatcgtcgtagctaccggcgttatggttgggtagatactgacggcagaagcttacgacacccgcatcgatttccaccatcgtgatactctcaacgtttttatgtcgggttacttcacgcagcatggcaccgtcgccgccgccgataatcagcacatgtttcgcgtgaccatgggccagtagcggaacatgggtcatcatctcatgatagataaactcgtcgcgctcggtggtttgtactacgccatccagcgccattacgcgaccaaatgcagcgttctcaaaaatgatcagatcctggtgatcggtcttttcatgatacagaacgttatctaccgcaaagtactgcccaaactggtcgtgtagcgtttcatgccactgttttttttcggccatgggttgatacctcctttgttaacacccgtaaaaaaagggcgcaacataatagctaacattgaccgcggatgcacggtcaatatttctacaaaaaggtatcagggattatttgacgtaggcaagcaggcttaaggaatcgcgggccagggctttgcattttttagcgacgggaatgccaatgccgctgagatcgcggtagctgtcttcaccgagggctttcatgtcgaaggtgtcgtaattactgaggtcccactggttttgctgagcgaaaaagaccagtgcgcgacgaatttgcccgttaggtaagttctggtaaccacaatcgttcttcagaaagacaaaaactgccgttaaatcggccatatcttcggcttcagactcgctgagcgcgtaactgtttgcgcagacggccatcaggctgccgaataacactgttctgaaaaacgtcttcattgcttctaccaggggcttaaagaagataaacgttagcacactgcgagcgaggcgacgaccattattgtcgattaaattgtgtctgcggcttgaccttcccgtaaggggaaggactatgctcaacgtttgattttgtttcgcctgcttaagaataaggaaataactatgcaacgtcgtgatttcttaaaatattccgtcgcgctgggtgtggctagcgctttgccgctgtggagccgcgcagtatttgcggcagaacgcccaacgttaccgatccctgatttgctcacgaccgatgcccgtaatcgcattcagttaactattggcgcaggccagtccacctttggcgggaaaactgcaactacctggggctataacggcaatctgctggggccggcggtgaaattacagcgcggcaaagcggtaacggttgatatctacaaccaactgacggaagagacaacgttgcactggcacgggctggaagtaccgggtgaagtcgacggcggcccgcagggaattattccgccaggtggcaagcgcagcgtgacgttgaccgttgatcaacctgccgctacctgctggttccatccgcatcagcacggcaaaaccgggcgacaggtggcgatggggctggctgggctggtggtgattgaagatgacgagatcctgaaattaatgctgccaaaacagtggggtatcgatgatgttccggtgatcgttcaggataagaaatttagcgccgacgggcagattgattatcaactggatgtgatgaccgccgccgtgggctggtttggcgatacgttgctgaccaacggtgcaatctacccgcaacacgctgccccgcgtggttggctgcgcctgcgtttgctcaatggctgtaatgcccgtagcctcaatttcgccaccagcgacaatcgcccgctgtatgtgattgccagcgacggtggtctgctacctgaaccagtgaaggtgagcgaactgccggtgctgatgggcgagcgttttgaagtgctggtggaggttaacgataacaaatcctttgacctggtgacgctgccggtcagccagatggggatggcgattgcgccgtttgataagcctcatccggtaatgcggattcagccgattgctattagtgcctccggtgctttgccagacacattaagtagcctgcctgcgttacctagcctggaagggctgacggtacgcaagctgcaactctctatggacccgatgctcgatatgatggggatgcagatgctaatggagaaatatggcgatcaggcgatggccgggatggatcacagccagatgatgggccatatggggcacggcaatatgaatcatatgaaccacggcgggaagttcgatttccaccatgccaacaaaatcaacggtcaggcgtttgatatgaacaagccgatgtttgcggcggcgaaagggcaatacgaacgttgggttatctctggcgtgggcgacatgatgctgcatccgttccatatccacggcacgcagttccgtatcttgagtgaaaatggcaaaccgccagcggctcatcgcgcgggctggaaagataccgttaaggtagaaggtaatgtcagcgaagtgctggtgaagtttaatcacgatgcaccgaaagaacatgcttatatggcgcactgccatctgctggagcatgaagatacggggatgatgttagggtttacggtataaaaagaccgtattcggaaatatgcccggatctctccgggcattaaactgatgacaaacgcaaatctgcctgatgcgctacgcttatcaggcctacgctagctgtgcaatccattgattttgcacaattttgtaggctggataaggcgttcacgccgcatccggcatgaacaacgcgcacgttgtcagcaatctgagcaagtcttacttcacatcatccggcagcgcataagccacaatatagtcgcccatcttcgtaccaaaactaccgtgaccgcctgcggagatcaccacatactgcttaccattcacttcataggtcattggcgtagcctgaccacccgctggtaaacgaccctgccacagtttttcaccgttgctcatgttgtaagcgcgcaggtagttatctgccgtagcggcgataaacagcacgttacccgccgtggagattggcccgcccagcatcggcatacccatattgaacggcaccggaaccggcatcgggaacggcatactgtcctgcggcgtaccaatacgtttcttccacaccacttcattagttttcagatccagcgcgctgatataaccccatgctggctgtttacatggcagaccaaatggactgaggaacgggttgagcgtgacaccatacggtacaccgtactgtggctgaatgccggattccgtacccgtgcctttggcatctttcggctgctccatcgggttgccaggaccacgcgggatcagtttgctaacaaacggcagtgccattgggttggcaatcgccacttcacgatttggatcaacggaaatcccgccccattcgaacatccccaggttacccgggaagaccagcgtaccctgttcagatggcggggtgaaaatgccttcatagcgcatctggtggaacatcacgcggcacaccagttggtcaaacatggtggctccccacatatccgcaccgctcaaatctttcgtcggacggaagctcagttcagaaaacggttgagttggggttacgtaatcgcctttcgctgcaccttggggaaccggtttttccggtgccggaaccaccagttcgccattacgacgatcgagcacaaaaatgttgccggttttcgccggagcgtaaataactggcactttctgaccattaacggtgatgtccgccagcgtcggctgtgccggaagatccatgtcccacaggtcgtggtgaacggtctggtagctccacgccagtttcccggtagtggcattcagcgccagaatgctgctggcataacgttcctgttccggtgtgcggttaccgccccagatatccggcgtggtcacgcccatcggcagatagaccagatccagcttcgcgtcataggccgctggtgcccaggagtttgggctgttaaaggtaaaggtgtgttcgtcagacgggattgcgttcggatctttcgcgccgggatcaaaagcccacagcagctccccggtgttgacatcaaaaccacggatcacgccagacgtttcgcgggtactgaagttatcggtaacactaccggccatcacgatggttttatcggtgataatcggtgggctagtcggttcatacagacccggtttggtgtctggcatattgctttgcagattgagcacgcctttattggcgaaggtttcgcacagtttgccgttttcagcgttaatcgcaatcagtcgaccatcattgaccggaagaatgatacgacgcgggcaatccgccatcacttccgggctagcggtttctgctttggcttcatgataagagacaccacggcaggttacgtgctggaaagactcgttggttttcagctcaggatcgtaatgccatttctctttgccgctggcggcatcaagcgcaaacaggcgctggtgagcggtacacaggtaaagggtgtcgcccactttaatcggcgtcacttcattggtgatttcacccggatcgttcggctgcttcacatcgccagtacggaacacccaggcttctttcagattatggacgttatcggcgttaatttgtttcagcgggctaaagcgttgaccttcctgattacgaccataggcaggccagtcctgatcggctacgggggagatagcttcagcaggtgtggcatcggcgcttaaggtgccgttgatctcctgcggatcgttaaatccggcccaggtcaggataccaccgctaatcagcagtgcgaccaccagtgcggcaactgcgccgctggcaggaatgaccaggcgacgccagacaaacggcaggatcagccagatgccgaagaagaccagaatgtcgctgcgcggagtcagcgcccagaagtcgaaaccaacttcccagacgccccaaatcatggtgccgagcagcagggctgcgtatagccaaagcgcggcgcgtttactgcgccacagcatccaggcgacgccgagcatcacaaggccagcgatagggtagtaccaggagccgccaatcgcgaccagccagcctccgccaatgagtagatacagcccgcaaagcgctgcaaaaagggctgttagcgtgacgagtaatcgtcggctgcctgtattgttaattgccataaagagacaccatttcaattcattaatattttagtagcaattaattataggttttaacatgtgtgatcgtcatcacaattcgagctttattaacagattccgcgaatgaatagttttactggtatactgcgtgtcttgcgctttgttgcggtgccaaaacctgcccgtgcgaagtgatttgtttttaaatcatatggttagagatatgaaacatactgtagaagtaatgatccccgaagcggagattaaagcgcgtatcgccgaactgggtcgtcagattactgagcgttacaaagacagcggcagcgatatggtgctggtgggtctgctgcgtggcagttttatgtttatggcggacctgtgccgtgaagttcaggtatctcatgaagtcgactttatgaccgcctccagctacggtagcggcatgtccaccacccgtgatgtgaaaatcctcaaagatctggatgaagatatccgtggcaaggacgtgctgattgttgaagatatcatcgacagcgggaatacactgagcaaagtgcgtgagatcttaagcctgcgcgaaccgaagagcctggcgatttgtacgctgctggataaaccgtcccgtcgtgaagtgaacgtcccggtagaatttatcggtttcagcatcccggatgagtttgtggtgggttacggcattgattacgcacagcgttaccgtcatctgccgtatatcggcaaagtgattctgctggacgagtaagtgtgaagttgccggatgtgttgcatccggcatggcatttttatttgtggttggcgtgtttcagcttgaggttggaaatcccgtgacggtaacgttgctcaagggtttcgcggttggtggcggtaacatccagatcacgcagcaagccgtcgtgaatgccgtaggcccagccgtgaatggtaactttctgcccgcgtttccacgcactttgcataatggtggagtggcccaggttatacacctgttccatgacgttcagttcacacaaggtatccagacggcgctcttgcggcatttcgccgagcaaactgctatgtttgaaccagatatcgcggatatgcagcagccagttgttgataagccccagttccgggttttcaactgcggcttgtacgccgccgcaaccgtagtggccacagataataatgtgttcaacttcgagtacatccactgcatactgaaccacggaaaggcagttcaggtcagtgtgaatgaccaggttagcaacattacggtgaacaaagagttcgcccggttcaagaccggttaaacgttctgcaggaacgcgactgtcggaacatccaatccatagaaagcgcggtttttgcgcttgtgccagtttctcaaaaaacccgggatcctcttccaccagcattttactccatagtgcattgttgctgatgagtgtatctatgtctttcatggaggttaacgacctgtaaccaaataattacgtttggctaatatagggcaactccgggacgatttaaaccacagataaagtgtaagaacgtaaggtaagtaaaaatttatgaccattgcactggaacttcaacagcttaaaaaaacctatccaggcggcgttcaggcgcttcgtgggatagatttgcaggtcgaagcgggtgatttttatgcgcttctcgggccgaacggggccgggaaaagcaccactatcggtattatcagctctctggtaaataaaacctccgggcgggtcagcgtatttggttacgatctcgagaaggatgtcgtgaacgctaaacgtcagttgggactggtgccgcaggaatttaacttcaacccgtttgaaaccgtgcagcaaattgtggtgaatcaggcagggtactacggcgtggagcgcaaagaagcgtacatccgcagcgaaaagtatcttaaacaactcgatctatggggaaaacgcaacgaacgtgcgcgtatgttatctggcgggatgaagcgccgtttaatgattgcccgtgcgttaatgcatgaacctaaactactgattctcgacgaaccgaccgcaggcgtggatattgaacttcgccgcagtatgtggggctttttgaaggatttaaacgacaaaggcaccaccatcattctcaccacacactacctggaagaagcagaaatgctgtgccgcaatatcggcattattcaacacggtgagctggtggaaaataccagcatgaaggcgctgctggcgaagctgaaaagcgaaacctttattctcgatctcgcaccgaaaagcccgttaccgaagctcgatggctatcagtatcgactggtcgataccgcgacgctggaagttgaagtgctgcgtgagcaggggatcaacagcgtatttacgcagttaagtgagcagggcattcaggtattaagtatgcgtaacaaagctaaccgtctggaagagctgtttgttagtctggttaatgaaaaacaaggagatcgcgcatgatgcatctttactgggtggcgctaaaaagcatctgggcgaaagagatccatcgctttatgcgtatctgggtgcagacgctggtgccgccagtcatcaccatgaccctttactttattatcttcggtaacctgattggtagccgtattggcgatatgcatggcttcagctatatgcagttcatcgtaccggggctgatcatgatgagcgtgatcaccaatgcctacgccaacgttgcgagtagtttttttggtgccaagttccagcgtaatattgaagagctgctggtagcgccggttccgactcacgtcattattgccggatatgtcggcggtggcgtggcgcgtggtctgtttgttggcattctggtgacggcaattagtctgttttttgtgccatttcaggtgcatagctgggtattcgttgccttaacgctggtgctcacggcggtgttgttctcccttgcgggtttgctgaacggtgtgtttgccaaaacgttcgatgacatcagcctggtgccaacctttgtgttaacgccactcacgtatttgggcggggtcttttacagtctgactttgttgccgccgttctggcaagggctgagccacctgaacccaatcgtttatatgatcagtggtttccgctacggcttcctcggtatcaatgatgttccgctggtcactacctttggcgtactggtggtctttattgtggcgttttatttgatctgttggagcctgatccaacgtggacgtggtttgcgtagctaaggctatttcctctcctctggatttgggggagaggagttttgacggctatcaccctttatcaacaatggtcagggtagactgattttcggctaaggaggaaggcgatgttaggttgggtaattacctgtcacgatgaccgggcgcaagagatactggatgcgctggagaaaaaacatggggcacttcttcagtgccgggccgtgaatttctggcgcggattaagctctaatatgctcagccgcatgatgtgcgatgctctgcatgaagcggactctggtgagggtgtcatcttcttaaccgatatagccggagcgccaccgtatcgcgtggctagtttattaagccacaaacactcccgttgcgaagtgatttctggtgtcacgttaccgttaattgaacagatgatggcttgccgtgaaaccatgaccagtagtgagtttcgcgagcgtattgtcgaactgggtgcgccggaggtgagtagtctttggcaccaacaacaaaaaaatccgcctttcgtcctcaaacataatttgtatgagtattaacccgcgattctgatggcgcttttgctacaataaaagcgttgtttcaccctcggttattttttcatgtacaaacaagctgttattctcctgctgatgctgtttaccgcaagtgtcagtgccgcgttacctgcccgttatatgcaaaccatcgaaaatgctgcggtctgggcgcaaattggtgacaagatggtgaccgtggggaatattcgggccggacaaatcattgccgtggagcccactgccgcaagttattacgcatttaattttggctttggcaaaggttttatcgataaaggtcatctcgagccggttcaggggcgacaaaaagttgaagacggtttgggcgacctcaacaagccgctgagtaatcagaacttagttacctggaaagatacgccggtctataacgcgccgagtgcgggaagtgcgccatttggggtactggcggacaatttgcgctacccgattttgcataaactgaaagacaggttaaatcaaacctggtatcagatccgtattggcgatcgactggcctatatcagcgcactggatgcccaacccgataatggcctgagcgtgctaacctatcaccatattctgcgcgacgaagaaaacacccgttttcgccatactagcacgaccacaagcgtacgcgctttcaataaccagatggcctggctgcgtgacaggggatacgcgacactgagcatggtgcagctggaaggctacgtgaagaataagatcaatctccctgcgcgagcggtggtgattacctttgatgatggcctcaagagcgtgagccgctatgcgtatcctgtgttgaaacaatatggcatgaaggcgacggcgtttattgttaccagtcgcatcaaacgtcacccgcagaagtggaacccaaaaagcctgcaatttatgagcgtttctgagcttaacgaaattcgcgatgtatttgatttccagagtcatacccattttttgcatcgggtagatggttatcgccgacccatattactgagccgtagtgagcacaatattctgtttgattttgcacgtagtcgccgcgctctggcgcaatttaatccgcatgtctggtatcttagctatccgtttggcggatttaatgacaacgccgtgaaggcagcaaacgatgccggatttcacctggcggtgacaaccatgaaaggcaaagtaaaaccgggggataatccgttgttactaaaacgactttatatcttaagaacggatagcctggagacgatgagccggctggtgagtaaccagccgcagggataacaatcaagcaacctgtaccggaatcgctttcgcggtacgtttcatttcattgtcgccttcaaaataggcgacgttgggtcgccaggtgcgagcttcttcatctggcatggtaacgaagctggcgatgatgacaatatcgccgacactggcgcagtgggccgccgcaccgttaacagaaataattctgctaccgcgttctgccgcgatggcataagtggagaaacgcttgccgttggtgacattccagatatcaatggcttcgttttcgagaataccggctgcgtcaagaaaatcctggtcaatggcgcaagaaccttcatagtgcaggtccgcatgagtcactttcacgcggtggagtttgccctgcagcatcgtgcgaatcataacttctacctttctaccctgtcgttaacgaagcaggcgatgcctgctttgaggaaattctcacgcagtattgcccgatttttgtttagtgtctactcatctgacggcatttgcgtcagcagtttgcgtaccgcgccgaagcgtgccatgtatcgcctgtaacgaattgatatttctctgaacgctgctcggtaaacaataaagaggtggctgacgatagcgcgccttgactggatactgccttcacgcaaagccacacggaagacagggaagatggatgcaccgagtaccacaccgcatgacgcggtatttaaacaatttttaatgcatgcggagacggctcgcgactttctggagatacatttgccagtggaattacgcgaactttgtgacctcaacacgcttcatttagagagcgggagtttcattgaagagagcctgaaaggacacagcacggacgtgctctattccgtgcaaatgcagggcaatcccggttatctgcatgttgtgattgaacaccaaagcaagccggataagaaaatggcctttcgcatgatgcgttattctatagccgccatgcaccggcatctggaggctgaccacgataagctgccgctggtggtgccgatactgttttatcagggcgaggccacaccttatccgctaagtatgtgctggtttgatatgttttacagcccggagctggcgcgacgcgtctataacagtcctttcccgctggtggatatcaccatcacaccggatgacgaaatcatgcaacatcggcggattgcgattctcgaactactgcaaaaacatattcgccagcgcgacttaatgttattgcttgagcaactggtcacgctgatcgacgaagggtacactagcggaagtcagttagttgccatgcaaaactatatgctgcaacgcggtcatactgaacaagcggatttgttttacggtgtgttgagagacagggaaacgggaggggagtctatgatgacgctggcgcagtggtttgaagagaaagggattgagaaggggattcagcagggaagacaggaagtaagtcaggaattcgcccagcgtcttctgagtaaaggaatgtctcgggaagacgttgcagagatggcaaatttacctcttgctgagattgataaggtaattaaccttatttaagttacctgtgttatgacagatgacgtggggtaaattaataactggcgccatcagccgtagcgccagttaagtattacgccagctcgaccattttgttgtcgatcaggcgagcatcgccaagccaggcggctaccagaattactgcccgtttgctggtttcagaaacttccagcaatgtgtcggcatcgcgaatctgaatatcatcggcgcggaagcctttttcattcagttcttgccccgcaatggtaataatttcatcgagatcccgttccccagcctgcaatttgtcagcaatgctacttaaaactttgtacagaccaggcgcaattttgcgttgttccgccgtcagataaccgttacgggaacttagcgccagaccgtctttggcgcgcataattggcacaccgacaatctcaatatcgaagcccatatcggcaaccattttgcggatcagcgccagttgctgaaaatctttttcaccgaagcaggcgatgtccggctggaccaggttgaacagcttgctgacaatagtgctaacgccgcgaaaatgtcccggacggctggcaccttccagcatggtgctaaggccaggaacgtcaacgtaagtgtgggtttcagtaccgttcgggtagatctcttttacgctaggggcgaaaactaaatccactttacgtttgtttagcttctcgcagtcctcctgcaaggtccgtggataacgagccagatcttccgggcggtcgaactgcatcgggttaacgaaaatactgacgacgaccacatcggcgcgggctttggcttcgtcgaccagcttcatatggccatcgtgcaggttacccatggtaggcaccagcgccacgcgcttgccttccatacgcaggcggcgaatttgctgacgcagcagcggcagggtttcgataattaacacaacgtgactccttaatggaaactgtgttcttcgcccggataaacgccggactccacttcagccatatactgccgcacagccgcgcggatgtcgcccgtttcggcgaggaaatttttagcgaatttaggaatgtgaccgccggtaataccaaaggcgtcgtgcatcacgaggatctgcccgtcagtgacgttgcctgcgccaatgccaataaccgggatcgccagtgcttcggtaatacgttttgccagttcaaccggcacgcattccagcaccagcagctgtgccccagcagcttctaaggctaatgcatcgctgagcagttgatcgcccgcttcatcgccgcgcccctgaactttgtagccaccgaaaatattcacactctgtggtgttaaacctaagtgaccacatacaggaacggcacgttcggtcagcatttgtacggtttctaccagccactcaccgccttcaattttgaccatgttagcaccggcacgcataaccgttgcggcgttttcgaaggcttgttccggcgtggcatacgccataaacggcaggtcagccagcagcaggcagtttggtgcgccgcgacgtacggcggcagtgtggtaggcgatatcggcaacggtaactggcagggtggagtcgtgcccctgaaccgtcatgcccaggctatcgcccaccagcatgacgttaagcccttcatcagcaaagagtttggcgaagctatagtcataagcggtgatggtcgcgaaacgttttttttcctgtttgtacttctgcagtaaggagatggtggtcggtttcataacgtatcctgataaattgatgttgtgctgtctggcattttatcagtcacattggtgggggcaatgatttatccgtagcagcactgccagaaggtgacagtgctgctacgttatcagggataggttacctggaaagtactggtggctttaaattcgccgggttcgatagcaatattcccgtcttgctttaatgttgcctggaaatgaagaggctgacttgtgccgttaccttgattagggtaaaccccatcggaggtgtcatcttcggtttcataatctatataaacagaattcgtatcattaggttttaatgtcattagcggatttttactggttgctaaaccttcaatgagtacgccaacgcctttggcggcagtgcttccagtaagcgtattaccaagcagttgtgtgttttgagtacctacttttccagtgacgagttttgtttcaatattacgcacacgaatacaattctgaaggctgatatcaaagggaacaggactagcgccatttttaattgtcccagagctatattctcccattctaaccgtactaccattgacacttggcccggtaagtatggaggtaaaacatgttggtaaggttaatttgacattattcagtgtgaaattgacataaatgtggttgctgtgatctacaacttttgtaccaggactgtaggccttaaagctataaaggtaattactactactggataactggacttgctgattaagtgtaggatcgaaattagtatctgtataaaattcaacagttatgttgtgtactataccaccaatagcccaaaacttatcgtagtcgtctgctttgttgcaacccttagtttgtagatcgctgtctgtgacggaaaagaaaaattcttggttggaaggatctccgatatagattcctgggctttgaatgtcagttattgtatcgtatgcagaccagaccctacttattaacatggtgtaatacagaccaggaacagatgtattaaatagtttatgtccgccataatctttaccactatagaccatggcattttcaatagttattggaccaggattcgctctgccagatgtattgcagtaaagaataccaccaccggtacctgtatccaggtaactccagtacatttttaccccagtcgggccgagctgcgtgggtttataaaaaaccaagttgcttgctgtacttgtgtaattaaaggtcatctgtgcggcagtggaggggcctcgatagttatcaactcctgcattatttcccacaataaaacttgtatatgcactgactgtattacaacaagaatacagtgctaaaaaaagaatgtacctgaagatagtcttcatttttactccaatgtttctttattgttatggtttgcgctgtttttgtttgttattcgtagtaaatatccactaacacatggctcataagttgaccagatgtaacactcaatgcaggatcgattttttgcattcgggtgctaaatttccaggaactaccattcatgtcatcgctcattactggataaacggaacgagatccgccactagcattaagaacattgaatgtattcgcgctatcctgagtagaaaatataactactcctacattacttgctccactgctaatttcattagcaaatatttgcctagagccagcagccatgacaccgctaagggctctaaaatcaatatgtaactgatttagcacatcgccagttccctgtaatgcacagtcggatacagtgatagtgaactcttttccacctggttgataactttcaggagtaacattaccactaaaatatcccaccccaacgacgccaagatcaatattaccctggttactgattccgcttttgcaggtgctgttttttacattggcaacaaggtcaatatcctgtccagcaatggctggacaggcgatgcaaaacagtaaactcagaaacagaattattctcttcatcagcttacgttgagtgggatgcatatatagttcctgaatctgtaagtctgttagttataggttactgtaaatgtggctggtgcagaaaacttacccgcagtgacattgtttacggttttatttttttccacgaccaggcgtgcactcatcggataataaacgaccgcattggctgcagtggagattgttacctcttgacttgctggtgttacacagctaaattgtgttgcactccctgttgccggagttacagtgctccagacttcaacggcgacagcacttgctttatctgcggctgtggaaccatttgcaaaccccgcaccgtcattagcagttccctcgcatgtggctcgcttggttaattttatttgcgcttttttattggggatacccgcacagtctttgaatttgagtttgaatgtttttactttggtcttggcattgatttcagaaatatatacatcaccaaaatcaacaacagaaatgtcctgatcagagtcatttactaatgtagcggtacaagtacccatttctacagtagtaataacggtcagtccaatactgtctgttgccgcataagagagtacgctgaacaaactggcagccaaaacgacactgctggataatccataacgtaaatttttaaatgtcatcataattatccttcttattgatagatgaaattaaacgtcgccagtgcacgaaaattccccggtacgccttgccctgcatctgtttcacgtagcgcaacggtcatttcaagacccttatcgggctgcatctcgtctgtgctccagcgtatcttttccgcactgttaggtttaaggaaagtggcatcatcagtagtccgttttttgaaacccataccgatattacttgtcgtgctagaactatcaccagactgcggtataataagcttaggactgctactacttgcatttccggtcagagtggtatcaatccaactgatgccactgctgcacccactggcaaccagtttaaaatcagcctgagattctgtcgttttattcgcgatcttatccagacccatcttagggattctcaatgtgtagttattattgccatcattcgtgacgttattaccagtaagtgtgatgttacaggttgtcgctttgacagtggctgtaaactctacattaatatccgttgcaaatacactgggacttaataatattcccatcagtatcactattttatgtggcgttgtttttatcatttgacgtcccttgtagttactgaatctgacaccgaattccattcagaataatagattgtgctattttttctgcttctgggctttgttgataatgcgcaagacaacttacgggtttactttgttcgagccatttaatgctgatatttccctgctgctcaataccacgaacaaatgcttgtccaccctgtccaacattaccaatgacattgccttgctcatcataaatatctgcagcaaatggaatatttttaccatcacttcgtgtgatgttcataatggcactttgcccttgcacggtttcaaaatcagcaaagacgacactaccctgacgcggtacagctactgcactggtactttttaattcaacatcgttctcaagatcgttgatatccagcgcgatacggttttcatgataaggagaaagagcgctggtgacaccataaccccatcgatcgatagtactgttgccataatttattcgcgctccttgagcacctggagcctgaactaccgccagtgtatcggagtcgctaaaactatcattactgaaagtcagtccaccgctatgcaatacaaaaccaccgtcggtgctgagagaaacttgacggctgttatcgctatttgcagaaatactacctgccagcgttccccatggactctcatagctggcataacccccaacataactcaaatctttgctggctttattcatcgtatagccagtattcacgctataactgacgcgagcgttatcgctatagccactgctgctaacgttgagttggttattacccttaaagtcactgcttatttgagtatcaatactctggaaaccactagtacgttgttcagtgccaagtaatttttcaattggaatggtgaaactaagataaacgctatcgtcagtgtcgccgtcttcattccaactacgctgggcactgacactgtagctgccccaggatgtactgttactgtagccaatagagtaattgctacgattttgtccggaagcccagtaatcggaccaacttccggaaagataaaaactaccgtaatcttttttctcaaatttcaacggttggttaatactgaccgtaacctgatttttcatgcgactgtaattacgcatggatttcggttcaagatcttgttcgggatgtttcacttcatcaattagagttagtgcatcattaagaccaaggtaattctgtgtgctatagcgataggccgcgatattcagactagtacttgtttcttcgaataacttgttccaggaaacacgataactttgcccctggtatgttttatcatccgggatacgaacattggaatgagtcacatcgaaagaaaatgcaccaacactagtattcagaccaagacctaacaaaccagcggtatagttattatcggttatctgaataccggtataacccgtcagatagttattcaggccgtagtagtagcttgcttgaaataaattaggctcatcctgaatatcatcttttaagacctgaccgccgctaatatcccaacgtccaacgccagggcgtaacatttgaacaacggaactgaaaggttggctgaatgtccgcttactgccatcggattcttcgatggtaacaataagatcgctgccgtacccactcggactcagatcatcaatgacgaaagcgcctggcggcaccgtcgtttcataaatcttatagccaccttgcgtaatagtgactttggcgttggtattggcaacgccatgaatgataggcgcaaagctggctaaagtcggaggcaacatgcggctgtcactgtataaacgaatgcctcggatactgacggaatcaaaggtttcgcccgtcgtataagactcaccaagaatgagttgagaacgcaggctggcgatatcacgctgaacataccgattcttaaaatcataattactgccagaatcggtcatccagttgtagttgccgctggcacgcagtcgccatgcacctaaattcatcccaccgttaaatgcagcataaatgctttcattttttcgaccaggggtttcactatgatatccgttgaggttgtaactcaacatggccgcattaatgccgttttcccataagcttggatcaacatagttttggtaatttttcattacccaggcttgaggaacgtctatatccagacgttgatcgttaacgtcataacgaacagaagcctgagggataatttccgtcaaattgaggcaattgccgagcgtttcatccctggcaagcagaacggctttttcgttatttatatcgggagaattaatatgaaactgcaataaattctttaatgtgatacaagcctgggcgttcttttttccttcaattgcgacaaatgtaatactttggttaatgattggttggtcgtttacataaacactgacgtcgtaaacacccggtatagcggggttaccttcactgtaccggctgagatcaatattagatgcattctgccccatcaggaaggtatggtcatattcaacgagttcagcactgaaagcagtattgcaatacagcagcgcgcaaaacgtggcgatacgggtcagatgatgataatttttagtatattctatagtcacgctatgcttcctgcggaattatatccttgcctgattacagcctggcattaccttcaattgcgccaccaaagtcattaatggcgtaaaaatgcacttttgcagaattcgctttgccattaaggccattgactttcatgacctcatcactaaatggtgcaatcattttcacatcaatcggatagcgtttaccgctagcttctaaatcaccactgctaaaagagacgtagtaaggggttggattggtcactcgtaaactcgccttaccttcactaccactccagaaccacttcagggctaacggggcttcagagggatttcccttcaatccatccgggcgatagaaaagttttatacgtgtgcgaaatgccagttgcagcaggctttgattcgcgaccttttctgcatctggttttggtggaacttccagtacgttaaaccagaacacgctctctctgtctttaggcagactggtgctggctgtgtacattaatttgattgtttgcccacgtttggcatcaatacggcttactggcggcgtagcagtaaaagggactgtaatactgccaggctcagcgttgtcatcgccagtatctaaccaactctggacaagcaacgggttattccctttattttccagacgtacgttgacacttttttgatcgcttttatatattacgcgagtaccgctaatgacaatgtccgcaatagagctactactaaaagccatacaggttacgaagcataaagctgttgtatgtttggtgttaaaaaacataaaccatccctgatagagttaattaaaacagggaataatataaaatagaaattattattccctgtatattcattcaatcaatttaactggtgaatacttactgataagtaatggtgtatgcagtgttagtttttacataaccagcagttgctgtttggtctgcgacggcacgaacgtaagacgctttaaaatcataaacagcagattttgtcgttgcatccagggctttagtatacacatcgccagggttgttaatttgaacctgtttgatagtggaaccatcaatattgtgtagagcgatattaacgccgtcagatgggttgttaatagacatgtcgttgttcaaagtccctttgctgttaccaaagaaaacagaaccgaaggtcattttagccgtgctacctggattcggatttgctttgctgcagtcaacggtgatgctgaaaggtttagctttagcgccaacggtgtcattcagtacgccagcatcgatttcaccaacggttgcggtttgcagcaggatcagaccatccttgttaccgccgtcaacgcgggtttcacaggtgttatcaacaaccagaccactgatatttaactgaccgccgtccatatcagcagaagcagtacctgcaaccatcgccagcataagaccagacagggcaaaacctaattttttagacataaaaatcctttaataaaattccattagtcagactacatgtttgaagaatgactattcatgacacaaataggagaaacaaatgttagatattaatgagcaatgatatttgttacccaaatttacaaccattgttcattaggtcgcctattgtgcactttagaagcttttgaacaaattaaatttacttaattcaaaattaagtaaaaataagttcacaagtgcaattggttagggtatggagatgggattgatatttatttataggaagttatattatttccgcaaagagatgtttaaactaaaatcgtaattaaggaaagagatgagatatgattttcagaaaatatttatattcgcaatataaataaattaccatttgtttaatttgtcaaatgctcttgtatgtaagatttgacgcaacatctccccatcaggaaacaccaactccggcgcgatttcaaacagcggccacagcataaatccacgattcttcatatcgtagtgcggaacggtcaggcgttcagtatttatcacttcattaccaaacagcatgatgtcgagatccagcgtgcgtggtccccagcgttcagctttgcggacgcgaccttgctgcaattcaatacgctgtgtgtgattgagtagctcttcaggtgcaagagaggtttccagcgccacggctgcgtttaagtaatcgggttgatcttgcggccccagcggtggggtgcggtaaaagctagaaacggtaagaatgtggctttcagggatatcgcctaatgctttcagggcagcattgacctgctccagcggagaggccagattgctgcctatggcaatatacgccactgtcatgcggtaccctcacgacgtggtgcgcgtttgcgtggacgacgagtacgacgacgcggactcggttcttcatccagctcgttgagcatccctttttggtctggtggcgcggaaacctggaactcaccccaccatttcaccagacgctgcagttcagcgttacgctcaacttcagctcgcaaggccaacaggtcataagccgcacggaacttaggatgctccagcagtttccatgcgcgtttaccctgacgacgggacatacgcaactgcaactgccagatatcgcgggttaatgtcgtcagacgtttcgggattgccagactacggcaggcttcgtccagcacgtcgttcatcgccagcgcgaaagcgtcgtgataggtcaggccgctttcctgggcgatcttctgtgccgtctccagcagtgggtaccagaacatggcggcaaacaggaacgccgggttcacgcgcatatcgttatggatacgcgtatcggtattcttcagcacctgttcaatgatccgctccatcgggctgtcgccattttccgtgaagtagcgggtaatggtcgggaacagcggctggaacagatgatattcacacaacagcttataggtttcgtaaccgtagcccgcttgtagcagtttaaggctttcttcaaacaggcgtgccggtgggatatcgttcagcagggtagcgaggcgagggatcggttctgcggtttccgggctgatgcgcatacccaatttggcggcaaaacgtaccgcgcgcagcatacgtaccggatcttcacggtagcgcgtttccgggttaccaatcagacggataacgccgtccttcagatccttcatgccgccaacgtaatcacggacggtaaaatccgctacgctgtaatacaggctgttgatagtgaaatcgcggcgctgggcgtcttcttcgatggagccgaaaatgttgtcgcgcagcaacatgccgttttgcccgcgttgggaggtcgtgcggtcgctgacgttaccttcgtggtgtccacggaaggtcgcaacttcgataatctccgggccaaacattacatgagccagacggaaacggcgacccaccaggcggcagttacggaacagtttgcgcacctgctcaggcgtggcgttagtggttacgtcaaaatctttcggctttttgccaagtaacaggtcgcgcacgccgccgccaaccagccaggcttcgtatcccgctttattgagcctgtacattaccttcagggcattttcactgatatctttgcgggaaatagcatactgctcacgcgggatcaccgtcacctgtggacgggcgactgcctgttcagcctcgctttcctcgcggcttagcaccttgcggcaaaaattagcgactcgggtaaaaatagtacacctcggtagtgtcaaacatcattcaggacaaaaaaatagcggctaatcatagctcagcaactcgcattactgaatgtactatttacaattgcgctctcgggcacggcggtaagccgccagtttttgacggcactctgaaggatttgctcgacgctgaaatcctgccagtgtgcttctgcctgctgccccagaaattgaagtgccgcgattagtaccgggcgtggatcgcctttcggcaacgcaggcgcatgattctgcttggaaagtttagcgccttgtggattaagcgccagcggcagatgaatgtaatctggcactttccagccaaaaagctggtacaggctgatttgccttactgttggttcaatcagatcagccccacgcactatttctgtaacgccctggaaatgatcatcaaccacaacagccaggttgtaggcgaacaacccatcacggcgatgaatgataaaatcttcccgtgccagtttttcgtcggcgtgaataatgccgcgcagctggtcagtaaattgcgtgaccggatgctgctggcggatacgcactgcggcgttgtctggtccatgatgcaacacccggcaatgaccgtcgtaaataccgccaatgctttgaatacgcgcacgcgtacaggtgcagtaataacttagtccttgttcatgtaaccaggcgagtgcttcacgataggcgtcgtgacgttggctttgccagagaacatcgccgtcccagtgcagaccgtaatgttccagctggcgcaggatagtttctgcggcaccgggaacttcacgaggcgggtcgatatcttctatgcgtaccagccagcgaccttgccgggcgcgagcctgcaaatagctgccgagcgcggcgatcagagagccaaaatgaagctcgccggaaggagagggggcgaagcggccaatatactgtgtgtctgtcatctctttgaacaaaaaataaggcgggagcatttcccgcctgtggtaaacgtgatggaacggctgtaattagccagccatctgtttttcgcgaatttcagccagcgttttgcagtcgatgcacagatcggctgtcgggcgcgcttccagacggcgaataccaatttcaacaccgcaggattcgcagtagccgaaatcttcgtcttccacttttttcagcgtcttctcgatctttttgatcagcttacgctcgcgatcgcggttacgcagttcgaggctgaactcttcttcctgggctgcacggtctaccgggtccgggaagttggctgcttcatcctgcatatgtgtaacggtgcgatcgacttcatccctgagttgattacgccatgcttccagaatacgacggaagtgcgccagctgggcttcattcatatactcttcgcccggcttctcctgatatggttccaccccagcgatggcgagaatactcagggagcttgttttacggttttgcccttcttgcatgttgcttctccttaacacgcactatcgatccccatgttcgggggaaaaatgaggccgctataaatagcagatgcttttccggatagcaattatctaaacgtaacacttgacaactgtgtgaggaaaagcgtatttgcgcacgcgaccagaatgtaaattaaccagttacttactttattacaatgtaaccggcagactttttttaagagccatgccttcagcagaaatttccgctttgtaagccagaatttctacccccctctgttgagcttcactcaatagttgcgcgtatttctcatcgatgtggcgcgcgggactaaaccgtgtaatggcactatgcagcacggcgaaaaagataaccgcacgctggccttcagccgctacgctcatcaactcccgaaggtgtttctgacctcgttcagtgaccgcatcgggaaaatatccctgttcgttctccgctaacgtaacgcttttcacttcaatatagcagtctggacggctatccgcctgcaacataaagtcaatacggctgcgttctgcgccgtattttacttcgcttttcaggctgctatagccactcagttcactaatactttcattaaggatagcctctttcgtcaacctgttagcccaaagcgtgttgacgcaaataaatgcgccgctctggctttgagttaattcccaggtgtgtgggtatttccgtttggtgttgtcactagtgctataccagacggtatcgccaggcgttgcacaaccggtcatcgcacccgtattcgggcagtgtagcgttaattcgcgaccatcgggtgtgatcacatcggctaaaaaacgtttgtaacgctgaattagcgtcgcgcgctgtagagggggagaaaattccattgcgacaatccttgttattgcgttagcgcccagcgttttagcggcgtgtagcgtgtgcgtccacgggcaaagctggaggcgtaaagggtgaactccgtcaccgcatagctccagttaaaacctggcggcgggattgtcaccgcctcgctggcgtcgcgcaataaggtaatatgtggatgaaacggacgattgctttgaaaacaaccgctgcgggcagcctgactacggagcatattcgccagctggattaagccgcgtggcggctgacgcatccctaaccacaccacacggctacgcagccattgtccggcgtcatcaagcgtgagtgtgaaaccaggttgacgaatccgtccggctaaaagagaaagcgccttctctttctcggcgctcacttcgcctaaaaatgccagagtcagatgcaaattatcggcggcgaccggacgtcccgcctcaggtgggaagtgtgtggcgcgccaatggataatctgttcgcggatttctgcaggtaagtcgatagcaaagaacagacgttgcggttcagacatgtgaggcactcggttatgaattaccgcgatgctacaatgtggcgcgaagaatgttaaccctctggagcgttttgtgagcagcttgcccgttgctgccgtcttacctgaattacttaccgctctcgattgtgcgccgcaggtattattaagtgcgccgaccggggccgggaaaagtacctggctgccgctgcaactgctggcgcatcccggcattaacgggaaaattatcctgctggagccgcgtcgtctggcggcgcgtaacgtcgcgcaacggctggcggagctgcttaacgaaaagccaggcgataccgttggctaccggatgcgtgcgcaaaactgcgtcgggccgaatacccgcctggaagtggttaccgaaggcgtgctgacgcgcatgatccagcgtgacccggaactgagcggtgttggactggtgatccttgatgaatttcatgagcgcagcttgcaggcggatttggcgttggcgctgttactcgatgtgcaacaaggtctgcgtgatgaccttaaactgctgattatgagcgctaccctggacaacgaccgcttgcagcaaatgctgccagaagcgcctgtcgtcatcagtgaagggcgcagctttccggttgaacgccgttatttaccgctgcccgcgcatcagcgttttgacgatgccgttgcggtagccaccgctgaaatgctgcgtcaggaaagcggaagtttactgttatttttacctggcgtcggagaaattcagcgtgtgcaggaacaactggctagccgcatcggcagtgatgtattgctctgcccgctgtatggcgcgttgagcctgaacgatcagcgaaaagcgatcctcccggcaccgcaagggatgcgcaaagtggtgctggcgaccaatattgctgaaaccagtttaaccattgaaggtattcgtctggtggtggattgtgcccaggagcgtgtggcgcgttttgatccgcgcacggggcttacgcgactgattactcaacgcgttagccaggcatccatgacgcagcgtgccgggcgcgccgggcgtctggagccgggtatcagcctgcatttaatcgccaaagaacaagcagaacgcgccgcggcgcaaagtgaaccggagatcttacaaagcgatctttccggtttgctgatggaattactgcaatggggatgcagcgatccggcgcagatgagctggctggatcaaccgccagtagtgaatctactggccgcgaaacgtctgttacaaatgctgggggcactggagggtgaacggcttagtgcgcaagggcaaaaaatggcagcgctgggtaacgatccgcgtttagcggcaatgctggttagcgcgaagaacgacgacgaagctgctaccgcggcaaaaattgccgccattctcgaagagccgccacggatgggcaatagtgacctgggcgtggcgtttagccgcaatcaaccagcctggcagcaacgtagtcagcaactgttaaaacgcttaaacgtacgtggcggtgaggcagacagtagccttatcgcgccgctacttgccggggcgtttgccgatcgcattgctcgtcgccgtgggcaagatggacgctatcaactggcaaacggcatgggagcgatgctcgatgccaacgacgcgctaagccgccacgaatggttgatcgcaccgttattattgcagggcagcgccagcccggatgcgcggattttactggcgctgctggtcgatattgatgagttagtacaacgctgcccgcagctggtacagcagtctgacactgtggagtgggatgacgcgcaaggtacgctgaaagcctggcgtcggctacaaatcggtcagttgacggtgaaagtgcagccgctggcgaaaccgagtgaagacgagttgcatcaggcgatgcttaatggcatccgtgataaaggtttaagcgtgctcaactggacggcggaagcggaacagctacgcttgcgtttgttatgcgccgcaaagtggttgccggaatatgactggccagcggttgatgatgaaagtttattggcagcgctggaaacgtggctgctgccacatatgactggcgtacatagtctacgcggcctgaaaagtctcgacatttatcaggcactacgcggattacttgattggggaatgcagcaacgtctggatagtgaattgcctgcgcattacactgtgccgacgggaagccggatcgccattcgttatcatgaagataacccgcccgcgctggcggtgagaatgcaagagatgtttggcgaggccaccaatccgacgatcgcccaggggcgcgtgccgctggtgctggagttgcttagtcctgcccaaaggccattacaaatcacacgagatttgagcgacttctggaaaggagcgtaccgtgaggtgcaaaaagagatgaaagggcgttatcccaaacatgtctggccggacgacccggcaaatactgcaccgacgcgacggacgaaaaagtatagctaaggttggttttctccctctccctgtgggagagggccggggtgagggcatcagcgcgcacgttcaccctcaccctaaccctctccctcaagggagaggggaccgatcgagcacaaattttgagagatatcttcttctgtcttgtaacagaagaacagaaaatcgggcttttgcgcctgaatattgcggagaaaaagcatggccgggaatgaccgcgagccaattggacgcaaagggaaaccgacgcgtccggtcaaacaaaaggtaagccgtcgtcgttacgaagatgacgatgattacgacgattatgatgactatgaggatgaagaaccgatgccgcgcaaaggtaagggcaaaggcaaagggcgtaagcctcgtggcaaacgcggctggctatggctactgctaaaactggctatcgtttttgccgtgctgatcgccatttacggcgtttatctcgatcaaaaaattcgtagccgtattgatggcaaggtctggcaactgcctgcggcagtttatggccgaatggtcaatcttgagccagacatgaccatcagcaagaacgagatggtgaagctgctggaggcgacccagtatcgtcaggtgagcaaaatgacccgtcctggcgaatttaccgtgcaggccaacagcattgagatgattcgccgtccgtttgatttcccggacagtaaagaaggacaggtgcgcgcgcgtctgacctttgatggcgatcatctggcgacgatcgtcaatatggagaacaaccgtcagttcggtttcttccgtcttgatccgcgtctgatcaccatgatctctagcccaaacggtgagcagcgtctgtttgtgccgcgcagtggtttcccggatttgctggtggatactttgctggcgacagaagaccgtcatttttacgagcatgatggaatcagtctctacagtatcggacgtgcggtgctggcaaacctgaccgccggacgcacggtacagggtgcgagtacgctgacgcaacagctggtgaaaaacctgttcctctccagcgagcgttcttactggcgtaaagcgaacgaagcttacatggcgctgatcatggacgcgcgttacagcaaagaccgtattcttgagctgtatatgaacgaggtgtatctcggtcagagcggcgacaacgaaatccgcggcttcccgctggcaagcttgtattactttggtcgcccggtagaagagctaagcctcgaccagcaggcgctgttagtcggtatggtgaaaggggcgtccatctacaacccgtggcgtaacccaaaactggcgctggagcgacgtaatctggtgctgcgtctgctgcaacagcaacagattattgatcaagaactctatgacatgttgagtgcccgtccgctgggggttcagccgcgcggtggggtgatctctcctcagccagcctttatgcaactggtgcgtcaggagctgcaggcaaaactgggcgataaggtaaaagatctctccggcgtgaagatcttcactacctttgacagcgtggcccaggacgcggcagaaaaagccgccgtggaaggcattccggcactgaagaaacagcgtaagttgagcgatcttgaaactgcgattgtggtcgtcgaccgctttagtggtgaagttcgtgcgatggtcggaggttctgagccgcagtttgcgggctacaaccgtgcgatgcaggcgcgtcgtagcattggttcccttgcaaaaccagcgacttatctgacggccttaagccagccgaaaatctatcgtctgaatacgtggattgcggatgcgccaattgcgctgcgtcagccgaatggccaggtctggagtccgcagaatgatgaccgtcgttatagcgaaagcggcagagtgatgctggtggatgcgttgacccgtagcatgaacgtgccgacggtaaatctggggatggcgctggggctgcctgcggttacggagacctggattaaactgggcgtaccgaaagatcagttgcatccggttccggcaatgctgctgggggcgttgaacttaacgccaatcgaagtggcgcaggcattccagaccatcgccagcggtggtaaccgtgcaccgctttctgcgctgcgtagcgtaatcgcggaagatggcaaagtgctgtatcagagcttcccgcaggcggaacgcgctgttccggcgcaggcggcgtatctgacactatggaccatgcagcaggtggtacaacgcggtacgggtcgtcagcttggggcgaaatacccgaacctgcatctggcagggaaaacagggactaccaacaataacgtagatacctggtttgcgggcattgacggcagcacggtgaccatcacctgggtcggccgtgataacaaccagccgaccaaactgtatggtgccagcggggcaatgagcatttatcagcgttatctggctaaccagacgccaacgccgctgaatcttgttccgccagaagatattgcagatatgggcgtggactacgacggcaactttgtttgcagcggtggcatgcgtatcttgccggtctggaccagcgatccgcaaagcctgtgccagcagagcgagatgcagcagcagccgagtggcaatccgtttgatcagtcttctcagccgcagcaacagccgcaacagcaacctgctcagcaagagcagaaagacagcgacggtgtagccggttggatcaaggatatgtttggtagtaattaacatctaagcgtgaaataccggatggcgagttgccatccggtaaaataacatcccatctaagatattaaccctttcttttcatctggttgtttattaacccttcaggaacgctcagattgcgtaccgcttgcctgtaagactcaatgtaagccgtgccaaaatatgatggctaggacgagctagaacccgccagcgtttcgaatattatcttatctttataataatcattctcgtttacgttatcattcactttacatcagagatataccattccatataacggccctgtacgcctggacggataaagcgtttacgcgacaacggatgcccgatgcgacgctggcgcgtcttatcgggcctacaaacggccccgaatcgtaggtcggataaggcgttcacgccgcatccgacaaaccatgctggatcacaacttcgcaaacacccgacgtgcagcatcgatggtgttattgatatcttccatgctgtgcgccacggacataaagcccgcttcaaacgcactcggtgccaggtaaacaccttcgtccagcatcatatggaagaaacgcttaaagcgttccacgtcacaggccatcacatcctgatagcacgtcacggactcggcgtcggtaaagaaaataccgaacatgccgccaacgtggttaacgaccagcggaattccggcttcttctgccgcttccagcagaccttctgccagacgtgttgtcagctcatccagcgtttcgtgaacgcccggctgcgcgacttcattcagacaggcgaaacccgctgccatcgcaatcgggttaccggaaagcgtacccgcctgatagaccggacccgtcggggccagcgcatccattacatcacgacgaccaccgaatgcgcctaccggcattccaccgccgatgattttgccgaggcaggttaaatctggcactacgccgtaataatcctgtgcgccagctagcgctacgcggaaaccggtcatcacttcatcgatgatcagcaacgcgccaaattcgtcgcacagcgcgcgcagacctggcaggaactctggcagcggcggaacacagttcatattgcctgccaccggctcgacgataatacaggcaatctcttgcgggtattgctcaaatgcggcgcgtacagaagccagatcattataagtacaggttaaggtatatttggcgaaatctgccggaacgcccgggctgtttggctggcctaacgtgagtgcgccagaaccggctttcaccagcaggcagtcagcgtgaccatggtaacacccttcaaatttaataattttgtcgcgaccggtaaaaccacgggccaggcggatggcgctcatggtcgcttcagtgccggagttcaccatgcgcaccatatccatggtcgggaccagttcggtcaccagttgcgccattttcacttccatttcggttggtgcaccaaagcttaaaccacgctcggcggcttcaatcacggcattgcggattgccggatggttatggcccagcaccatcggcccccaggaaccgacataatcgatataggctttgccatcaacatcgtacagataagcgccgtccgctttttcgataaacagtggagtgccgcccacgccagtaaaggcgcgaacaggggagttcacaccgccagggatcagctcgcgcgctgcgctgtaaagattttcagacttactcatggagggttcctgattcgtagaaaaagtgaatggctgctattctatgttattcataacaagttaaatactcgtcaaacatcaggctgcttgtactggtgcaatcctgatttcttagagtataaaagttttgtgcatttgaaacattacgctttgcaaaggattttcatggaacgtgcgagtaaaatgccgtcatcttatttgtatgaccaataagtgatcattggatgaaaactgatactccctctttagaaacaccgcaggccgcgcgcctgcgacgcagacaactgattcgccaacttcttgagcgcgataaaaccccgttagccattttgtttatggcggcagtcgtcggcacgcttgttgggctggcagcggttgcttttgacaaaggtgtcgcctggttgcagaaccaacgtatgggggcgctggtacatactgctgataattatccgcttctgttaaccgtcgcttttctctgtagcgcggtgctggcgatgtttggctactttttggtgcgcaaatacgcgccggaagcaggtggtagcgggatcccggaaattgaaggggcgctggaagatcaacgtcccgttcgctggtggcgtgtattgccggtgaagttctttggcgggctggggacactcggcggaggcatggtgttggggcgcgaagggccaaccgtgcagatcggcggtaacattggccgtatggtgcttgatattttccgcctgaaaggtgacgaagctcgccatacgctgctggcaaccggtgctgctgcggggctggctgcggcctttaacgcgccgctggcgggtattttgtttattatcgaagagatgcgtccgcagtttcgctatacgttaattagcattaaagcggtatttattggtgtcattatgagcaccattatgtaccggatttttaatcatgaagttgcgttgattgacgtcggtaaactttctgatgcgccgcttaatacgctgtggctttatctgatcctcggtattatttttggcattttcggccctatttttaataaatgggtgctggggatgcaggatttgctgcaccgtgtgcacggcggcaatattaccaaatgggtgctaatgggcggtgcgattggcggtctgtgtggattgctggggtttgtggcaccagcaacgagcggcggcggttttaacctgattcctatcgctaccgcggggaatttcagcatgggaatgctggtgtttatcttcgtcgcgcgggtcattaccaccttactctgcttctcttccggcgcgccgggcggtatttttgccccgatgctggcgctgggtactgtgctgggaaccgctttcggaatggttgccgttgagctgtttccgcaatatcaccttgaggcggggacgtttgctattgccggaatgggggcattactggcggcatctattcgcgcgccgttaacggggatcattctggttctggagatgaccgataactaccagctcattttgccaatgattattaccggtcttggcgcaacactattagcgcaatttaccggcgggaaaccgctatacagcgcgattcttgcgcgcacgctggcaaaacaggaagctgagcaactggcgcgaagcaaggccgcaagtgccagcgagaatacttgaacgaaataccagggtattagataatggcgattattattgggttagaatttgcccaattgccgatgtcgtttggagcaaaatatgagtgatgacgtagcactgccgctggagtttaccgacgcagcagccaacaaagttaaaagcctgatcgctgacgaagataacccgaatctgaaattacgcgtgtatatcaccggtggcggttgcagcggcttccagtatggtttcacctttgatgatcaggtgaacgaaggcgatatgaccatcgaaaaacagggcgttggcctggtggttgatccgatgagcctgcaatatctggtcggcggttccgttgattataccgaaggtctggaaggttctcgtttcatcgtgaccaacccgaacgcgaaaagcacctgcggttgcggttcttcctttagtatctaatctgttgttcatgtgccggataaactatccggcacatcttctctcttcaacgcccattctcatccagcgcaaacgtcggtagcttaagatgccaacgaatagccgccagccgaatcaatagcgtcacgaccatgcccatcatactggctgtttccagtggtacggaaaatgtgtaataagccgtagcgtggacaataccgccgataatacaggcagttgcgtagatttctgtacgtaaaatcatggggatttcgcgggccagaacatcacgaatgatcccgccgccaacgccagtaatgacgcccatacaaaccgcgattaacggaccggcttccgcattaaaggctttattcacgccaatgccgacaaacaccgccagaccaacggcgtccagcaccggcaacatccattttggtaagcgtcttggctggcgcaccagcacgatggtcagcatgctggtgaccattgcaacgaccagatcggtgggatctttcacccaaaataccgggccgtgatccagcgccatgtcgcgaattgtcccgccgcctactgcggttaccacgcccagtaccagaacaccaaaagggtccatacgcaattttccggctaacaaaacgccggagatggcaaataccgctgtgccgactatattcagccaatagacgagcattgttcaatccccactgagcacctgaaaaggtcaggcgttaatctacctgactaagcgcattacagagctgttgtgcagcgaggataatacgtgggcttgcacgttcaaaccagtcactcgtgagaggaataacgggaattttgagctgttcaccccagtattgtttgattttaggaatttggtccggtccgcctgtaatgacaatcgcctgtgggctgcgtgctaacacctgttcgcggctaacttgcggccagggaacccggctgtctttaaagatgttttctccgccacaaacttcgagtacctggttctgaatgctctcttttccactggtaaatggcggattaatgccgaattgcagaaaaacacgttttttaggtttatcagcatattgcgctttcaattgcgcgtactgatccagcagggattgcgcggcttgttcggccttgtctggttgcggactccagggggccagttgacgtaacgcattggcaatttgttcaatgcttgtcgcatcgacccacatcacttttattcccaggctagccagctggtcaacctgccgctcggcattacctccacgccaggcaatcaccagatcgggtttcagcgcgacaatgcgttccagattcatcccctgccaggtggaaacctgctcaatcttttgcgcttgtggaggatagtcggaatagctgctgaccccaaccggcgtgatcccggcggcaaaggcaagttcagtgttggcgggagaaagcgtgatgacgcgcggcgcggcgttgagccacagtggcgcaagaaaagacagggcgaccagcgccctgaacagactcttagccatgtgcaagtttctgcaccagactctcaaccatcaggctggactgtttagcggcaacagccaggaactcatcgaagctaagataagactgttgatcggccacgtcggagatggcgcgtacgacaacaaacgggacgttgaaattgtggcagacatgggcgattgccgtcgcttccatctctacagcaatggcctgtgggaagttgtggcggattttcgccagaccaacagaaccgttgatgaaagcgtcgccgctaacaatcaggccacgtacagcgttaagattcagttcggcaatgcaggcctcagcggcagcgatcagtttatcgtcagctttaaagcctgccggacagcctggtaactgaccgtattcataaccaaatgccgtgacatccgcgtcgtgataacgtgcttcgtcgctgacaacgatatcgcccactttcaacgttggtgccaggccaccggcagaaccggtgttaataatcacatctggcttgcagtgttccaacagcaaagtggcacccagcgccgcagcgactttaccgatgccgcttttcagaagcgcaacctcggttccattcagttggccggtatagatttcgcaaccgccgagactgatagtttgacggttttcgattttgtcacgcagcagcgtaacttcttcttccattgcaccaatgatgccgattttcatagatttactcgcgataagcccgatttgaaggcatagtttaccatgcgcttacggggaagcgtatttctcacgcgggagaggacatggcacagattgatttccgaaaaaaaataaactggcatcgtcgttaccgtagtccgcagggcgttaaaaccgaacatgagatcctgcggatcttcgagagcgatcgcgggcgtatcatcaactctccggcaattcgtcgtctgcaacaaaagacccaggtttttccactggagcgcaatgccgccgtgcgcacgcgtcttacccacagcatggaagtccagcaggtggggcgctacatcgccaaagaaattttaagccgtctgaaagagcttaaattactggaagcatacggcctggatgaactgaccggtccctttgaaagcattgttgagatgagttgcctgatgcacgatatcggcaatccgccgtttggtcattttggcgaagcggcgataaatgactggtttcgccaacgtttgcacccggaagatgccgaaagccagcctctgactgacgatcgctgcagcgtggcggcactacgtttacgggacggggaagaaccgcttaacgagctgcggcgcaagattcgtcaggacttatgtcattttgaggggaatgcacaaggcattcgcctggtgcatacattgatgcggatgaatctcacctgggcacaggttggcggtattttaaaatatacccgtccggcgtggtggcgtggcgaaacgcctgagacacatcactatttaatgaaaaagccgggttattatctttctgaagaagcctatattgcccggttgcgtaaagaacttaatttggcgctttacagtcgttttccattaacgtggattatggaagctgccgacgacatctcctattgtgtggcagaccttgaagatgcggtagagaaaagaatatttaccgttgagcagctttatcatcatttgcacgaagcgtggggccagcatgagaaaggtagcctctttagcctggtggttgaaaatgcctgggaaaaaagtcgcagtaatagtttaagccgcagtacggaagatcagttttttatgtatttacgggtaaacaccctaaataaactggtaccctacgcggcacaacgatttattgataatctgcctgcgattttcgccggaacgtttaatcatgcattattggaagatgccagcgaatgcagcgatcttcttaagctatataaaaatgtcgctgtaaaacatgtgtttagccatccagatgtcgagcggcttgaattgcagggctatcgggtcattagcggattattagagatttatcgtcctttattaagcctgagcttaagtgactttactgaactggtagaaaaagaacgggtgaaacgtttccctattgaaagccgcttattccacaaactcagcacgcgccatcggctggcctatgtcgaggctgtcagtaaattaccgagtgattctcctgagtttccgctatgggaatattattaccgttgccgcctgctgcaggattatatcagcggtatgaccgacctctatgcgtgggatgaataccgacgtctgatggccgtagaacaataaccaggcttttgtaaagacgaacaataaatttttaccttttgcagaaactttagttcggaacttcaggctataaaacgaatctgaagaacacagcaattttgcgttatctgttaatcgagactgaaatacatgaaaaaaaccacattagcactgagtgcactggctctgagtttaggtttggcgttatctccgctctctgcaacggcggctgagacttctagtgcaacgacagcccagcagatgccaagccttgcaccgatgctcgaaaaggtgatgcctagtgtggtcagcattaacgtagaaggtagcacaaccgttaatacgccgcgtatgccgcgtaatttccagcagttcttcggtgatgattctccgttctgccaggaaggttctccgttccagagctctccgttctgccagggtggccagggcggtaatggtggcggccagcaacagaaattcatggcgctgggttccggcgtcatcattgatgccgataaaggctatgtcgtcaccaacaaccacgttgttgataacgcgacggtcattaaagttcaactgagcgatggccgtaagttcgacgcgaagatggttggcaaagatccgcgctctgatatcgcgctgatccaaatccagaacccgaaaaacctgaccgcaattaagatggcggattctgatgcactgcgcgtgggtgattacaccgtagcgattggtaacccgtttggtctgggcgagacggtaacttccgggattgtctctgcgctggggcgtagcggcctgaatgccgaaaactacgaaaacttcatccagaccgatgcagcgatcaaccgtggtaactccggtggtgcgctggttaacctgaacggcgaactgatcggtatcaacaccgcgatcctcgcaccggacggcggcaacatcggtatcggttttgctatcccgagtaacatggtgaaaaacctgaccagccagatggtggaatacggccaggtgaaacgcggtgagctgggtattatggggactgagctgaactccgaactggcgaaagcgatgaaagttgacgcccagcgcggtgctttcgtaagccaggttctgcctaattcctccgctgcaaaagcgggcattaaagcgggtgatgtgatcaccagtctgaacggtaagccgatcagcagctttgccgcactgcgtgctcaggtgggtactatgccggtaggcagcaaactgaccctgggcttactgcgcgacggtaagcaggttaacgtgaacctggaactgcagcagagcagccagaatcaggttgattccagctccatcttcaacggcattgaaggcgctgagatgagcaacaaaggcaaagatcagggcgtggtagtgaacaacgtgaaaacgggcactccggctgcgcagatcggcctgaagaaaggtgatgtgattattggcgcgaaccagcaggcagtgaaaaacatcgctgaactgcgtaaagttctcgacagcaaaccgtctgtgctggcactcaacattcagcgcggcgacagcaccatctacctgttaatgcagtaatctccctcaaccccttcctgaaaacgggaaggggttctccttacaatctgtgaacttcaccacaactccatacatcttcatcatcctttaggcatttgcacaatgccgtacgttacgtacttccttatgctaagccgtgcataacggaggacttatggctggctggcatcttgataccaaaatggcgcaggatatcgtggcacgtaccatgcgcatcatcgataccaatatcaacgtaatggatgcccgtgggcgaattatcggcagcggcgatcgtgagcgtattggtgaattgcacgaaggtgcattgctggtacttagtcagggacgagtcgtcgatatcgatgacgcggtagcacgtcatctgcacggtgtgcggcaggggattaatctaccgttacggctggaaggtgaaattgtcggcgtaattggcctgacaggtgaaccagagaatctgcgtaaatatggcgaactggtctgcatgacggctgaaatgatgctggaacagagccggttgatgcacttgttggcgcaggatagccgtttgcgggaagaactggtgatgaacctgattcaggcagaggagaatactcccgcacttactgaatgggcgcaacggctggggatcgatctcaatcaaccgcgagtggtggctattgttgaggtcgacagcggtcagcttggcgtggacagcgcaatggcggagttacaacaactgcaaaacgcgctgactacgcccgagcgtaataatctggtggcgattgtcagcctaaccgaaatggtggtgttgaaaccggcgttgaactcttttgggcgctgggatgcagaagatcatcgtaagcgagttgaacaactgattacccgcatgaaagagtacggccagctgcgttttcgcgttagtctgggcaactattttaccggtcctggcagtattgcccgatcctatcgtacggcgaaaacgacgatggtggtgggtaaacagcggatgccagaaagtcgctgctatttttatcaggatctgatgttacctgtgttactcgacagtttgcgtggcgactggcaggccaacgaactggcgcgaccgctggcgcggctgaaaacgatggacaataacggcttgctgcgacgaacgctggcggcgtggtttcgccacaatgtgcaaccgctggcaacgagtaaggcgttgtttattcatcgtaataccctggagtatcggcttaatcgtataagcgaactgaccgggcttgatttgggcaattttgatgacaggttgctgctgtatgtggcgttacaactggatgaagagcggtaagttatgcgttaaggttgaggcggcgctggctcattcccctcagcccgaagggtagaggggaatgcccgaattaaccgtcagttcgggattatttacgcgttagtttttccagatcggcttcaatctcgctgatcttattggttacgacactctccaggtgacgtaagtcgtcgaggatcttacgcttaagatcaacttcgctgcggtcacgctggcagatttgatcaagctcatcaatgatataccgtagattcgggctgatttcctggacttctttataaccctgacccacaccatcagcgacgaccgttttacgctgacgcggatatttaaacttaacgctcttggcgaaaaactcgcctttgtctttctggaaatagattttcagaatatcgttgttggcttcctgccggaggctgtaacgatcaatttcttcaggattggtaatacccagacttttcagattgtcgtacatagcgttacctcaaaatgagtcagtaaattgtgcttattttagcatttggcctggcccgcccggctcgactgtgatcgcagaaagcctttttcttccagacttctatcatggcgtaaaaatcaaaaaattacctgctttattctggtgataaaattcacgatttacaccagttccagcatcgttacttccgggcggcagttcagacgcaaaccatacaaactgcccacgccacgggttgtgtagatgtgtctttcgccaaaggcatttaatccggcgacgtaacgtttatcttcgacaggggcaaaaggttcaccaaccaacggtacgcgcagttgcccgccgtgagtatggccgcacagcatcagatcccagggttcatcacgcatgacttctttgctgtcgggattatgcgccagcaccagtcttggcagattggcttcgctggcgggaggcggtttgcattgtccggcccataagtcaccagtgcctaccagttcgaattgcctgttcggcgtggcgatcaccgtagcctggttaaacaacaccgtgatgcccgcacttttcaacgtctcgccaattaagtgatttttttctgtaccaacagggcgatcgtggttgccgaagcaggcaaacgtcggcgcacattcggcaaggggggagagtacgtcactaaacgcgctaaaattcaggctcatatcaaataatacgtaatcgccgcccagtaatatcaaatcgggcttttgttctatgccaagagcaatcgcgtcagaaatcaggcttaaaggaacaaaacgagagtaatggagatcggccagaaaaagaattttgaatggtgctgcgttgtctttaaaaaaggcgaggcggtgacggattaattcaaaccagcctggctcacagtaatgcatataaccgaaaccactgctcgtggctatcgtcgcggcagtagcctgcaaaaatcggcggcgactaatcatcgctcatccctgcaaaaaaatcgggcagcgtcgtgctgcccgtgtgcatacttttagtcgatggtacgcagcagttcgttaatgccgactttgccgcgagttttcgcgtcaactttcttaacgataaccgcacagtagaggctgtatttgccatctttactcggcagattaccactaacaaccacagaccccgccggaacgcgaccgtagtggatttcgccggtttcacggtcgtaaatacgggtgctctgaccaatgtatacgcccatggaaatgacggaaccttcttcgacaatcaccccttcaaccacttcagagcgcgcgccgatgaagcaattatcttcaatgatggttgggttagcctgcagcggttccagcacgccgccgatgcccacgccaccggaaaggtggacgtttttaccaatctgcgcacaagaaccgacggtcgcccaggtatcaaccatggtgccttcatcaacatatgcgccgatgttgacgtaagacggcatcagcacggtgttacgggcaataaacgcaccctgacgtaccgccgctggtggcacaacgcggaagccttctttctggaaacgtgcttcgtcgtagtcggcgaatttcatcggcactttgtcgaagtagcggctttctgccccttcgatcacctgattatcattaatacggaaagagagcagcaccgcttttttcaaccactgatgcgtcacccactgaccgtcaattttttccgctacacgcagtgcgccggaatccagcagggcgatcacctgatttaccgcttcgcgggtaacggtgtctgcattggctggcgtgatctcggcacggcgttcaaaagcggtttcaataatgttctgtaactgctgcattgttaaactcttttcatatcagtaaacacatcaccctttatcgtttggattgagggcctctgtcaaccgctgatgcacttcctgctgcaactcgttattaagcgcacgccggtcagcggtggcaattatgaataaatcttctactcgctcgccaatggttgtaattcgggcaccatgaaggctaattcccagatcggcaaaaattttcccgactcgcgccagcagtccaggttggtcgagggcgatcagttcgaggaagcttttgcggtcggtatgggtcggcaaaaacgttacttcggtttcaacagtaaaatggcgtaatttggcgggttggcgacggggctgcggtggctgccagctactttgcgtcagtacttgctccagaccaaaccgaataacctcatgacgatctgcggacagcgggttgccatcgggttccagcacgataaaggtatccatcgccataccgtcgcgagtggtgaaaatttgtgcgtcgtgaacacttaaattgcggcggtctaattcggcacagacggcggcaaacagataagggcggtccgggctccagataaaaatctcggtgcctccacgcgtagcctgcgggctaagcaataccagcggtttgcttaaatcatgctgtaataaatggcgggcatgccaggccagttgatttgggctatggcggacaaaatagttagcacgacagcgactccaaatttggtgcagcgcctcttcgtcgatgttatccatgcgcagtagtgccagtgcctggagttggtgatggcgaacccgttcgcgcatatccggcgtgttttgcattccgcgtcgtagctgcttttcggtggcaaagtagagctcacgcaacagactttgcttccagctattccacagcgtttcgttggtggcgcaaatgtcagccacagtcaggcataccagatagcgcagacgattttccgtttgcacttcttcggcaaactgcttgatgacttccgggtcctgaatatcgcggcgttgggcggtcacgctcatcaacaggtgctggcgaaccagccaggcgaccagctgtgtttcgcgactgttcagcccgtggagttcggcaaaatgcactacatcctgagcaccgagaatggagtggtcgccgccgcgtcctttggcgatatcgtgaaacagcgcggcgatgaaaatcagctcagtactcggcaggcgcggccagacgtccacacacaacggatggcgctggcgcgtttcttcactggcaaaactctccagtttcagcatcacgcggatagtatgttcatccaccgtgtaggcgtggaacagatcaaactgcatctgcccgacgatatggctccattgcggcatatacgcgccgagcacgctatggcgatgcattggcaatagcccgcgccgcaccgctccggggtgacgcagaatgctcaaaaacagttttcgtgcttccggaatattacacagcggttgttgcagatggcgacgggcatggcgtaactggcgcagcgtggtggagtaaatgccggtgatcgcactgttgtgcaccatggtgtagaacatacgcaagatggcttccggctggcgcataaatagtgtttcatcacgcaggtcgattagcgtaccgcgtagctgaaactcatcgtcgattggacgtggtttttcgtcggcgggaagggcgaggatggcttcatcgaacagttgcagcagcatctggttgagttcactgacgcggcgtgtaacgcggaagtaatccttcatcatccgctcgaccggttcgttaccttcaccactgtaattcagacgctgggcgacgctaagctggcgatcgaataacaggcgattatcgtaacggctgacgaccagatgcagggcaaagcgaatacgccacaatatatgcagacattcgtttaattccgcccgctccgcactggttaagaagccaaacccgaccatttcatccaggcttgttgcgccaaaatgacggcgggccacccattgcagagtgtggatatcgcgcaagccgccagggctgcttttgatgtctggttcaaggttgtagctggtgccatggtaacgctgatggcgctggttctgttcttcaactttcgccgcgtagaacttgtcggaaggccagaatccttcgctgaaaatatgtttttgcagttcgaggaacagcgcaacatcgccaattaataagcgggattcgattaaattggtggcgacggttaaatcgcttaacccttccagcatgcactcttcaagcgtgcgcacgctatgaccgacttccagctttacatcccagagcagcgttaacagctcgcccactttttgcgcctgatcgtccgggagctttttacggcttaaaatcagtaaatcgacgtcactaagtggatgcagctcgccacgaccgtagccaccgacggcgaccaatgccaggtcggcaatctggctgaatcccgcttcaatccataatcgttgcaggagctggtcgataaactcggtgcgcgcctcaatcaactgttctgcagagatcccattgtcaaaggcatcacccagccaacgctggaaagtatcgatatgggcttttatcccaccgacggttaattcatcacggggccagacgcatggattttgcggttgaccgggcagggtggggagagcggtgtttgcgtactgttctggaagggtattcattgtgcgccacccataagattaaattatcgcattaaaaaagccggcattcgccggcttcatcttattcgtcgtggctgattatcgccgggatggtgtcatccttgcgtagcgtcagaatttcgcagccgttatcagtcaccacaatagtatgctcatattgtgcagacaagctgcgatctttggtttttaccgtccagccatctttcatggtgcggatctcttttttacccgcgttgaccattggctcgatggtgaacgtcatcccaggtttcagtacgacgttggtttcacgggagtcatagtgcagcacctgcggttcttcatggaagccgcgaccaataccgtgtccgcaatattcacgaacgacggagaagccttctgcttcgacaaatttctgaatcgccgcaccgatttcgcgcagattaatgcctggttttaccatgcgtagcgccaggtacaggctttcttgcgtgatgcggcacagacgttcgcccatgatggtcggcttaccgacgataaacattttgctggtatcgccgtggaaaccatctttgattacggtgacatcaatgttaacgatatcgccatctttcagcagcttagcatcgtccgggataccgtggcacaccacttcattaatagagatgcaaacggatttcggatagccgtgatagccgaggcaggcagaaaccgcgtgttgttcattaacaatgtaatcattacagatgcgatccagctcgccggtgctgacgcccggtttaacatacggttcgatcatctccagcacttcggcagccagtcggccagcgacgcgcattttttcgatatcttctggggtcttgatagagatagccattaattctgtccatcagcgtcggtgataccgacaatatatatgtaagtgccgtcaatggtatcacacccgggcaaattgagaatcattctgaatttcgccaaacgtgccactgaaggttttctataatagaaaattcgacgtctgatgctgtacacagcgccaacaattattggtgtccacgacgtatttgtggtataaagcgcgccggacttccgatccatttcgtatacacagactggacggaagcgacaatctcactttgtgtaacaacacacacgtatcggcacatattccggggtgccctttggggtcggtaatatgggatacgtggaggcataaccccaacttttatatagaggttttaatcatggcaactgtttccatgcgcgacatgctcaaggctggtgttcacttcggtcaccagacccgttactggaacccgaaaatgaagccgttcatcttcggtgcgcgtaacaaagttcacatcatcaaccttgagaaaactgtaccgatgttcaacgaagctctggctgaactgaacaagattgcttctcgcaaaggtaaaatccttttcgttggtactaaacgcgctgcaagcgaagcggtgaaagacgctgctctgagctgcgaccagttcttcgtgaaccatcgctggctgggcggtatgctgactaactggaaaaccgttcgtcagtccatcaaacgtctgaaagacctggaaactcagtctcaggacggtactttcgacaagctgaccaagaaagaagcgctgatgcgcactcgtgagctggagaaactggaaaacagcctgggcggtatcaaagacatgggcggtctgccggacgctctgtttgtaatcgatgctgaccacgaacacattgctatcaaagaagcaaacaacctgggtattccggtatttgctatcgttgataccaactctgatccggacggtgttgacttcgttatcccgggtaacgacgacgcaatccgtgctgtgaccctgtacctgggcgctgttgctgcaaccgtacgtgaaggccgttctcaggatctggcttcccaggcggaagaaagcttcgtagaagctgagtaataaggcttgataactcccccaaaatagttcgagttgcagaaaggcggcaagctcgagaattcccgggagcttacatcagtaagtgaccgggatgagcgagcgaagataacgcatctgcggcgcgaaatatgaagggggagagcccttatagaccaggtagtacacgtttggttagggggcctgcatatggccccctttttcacttttatatctgtgcggtttaatgccgggcagatcacatctccgaggattttagaatggctgaaattaccgcatccctggtaaaagagctgcgtgagcgtactggcgcaggcatgatggattgcaaaaaagcactgactgaagctaacggcgacatcgagctggcaatcgaaaacatgcgtaagtccggtgctattaaagcagcgaaaaaagcaggcaacgttgctgctgacggcgtgatcaaaaccaaaatcgacggcaactacggcatcattctggaagttaactgccagactgacttcgttgcaaaagacgctggtttccaggcgttcgcagacaaagttctggacgcagctgttgctggcaaaatcactgacgttgaagttctgaaagcacagttcgaagaagaacgtgttgcgctggtagcgaaaattggtgaaaacatcaacattcgccgcgttgctgcgctggaaggcgacgttctgggttcttatcagcacggtgcgcgtatcggcgttctggttgctgctaaaggcgctgacgaagagctggttaaacacatcgctatgcacgttgctgcaagcaagccagaattcatcaaaccggaagacgtatccgctgaagtggtagaaaaagaataccaggtacagctggatatcgcgatgcagtctggtaagccgaaagaaatcgcagagaaaatggttgaaggccgcatgaagaaattcaccggcgaagtttctctgaccggtcagccgttcgttatggaaccaagcaaaactgttggtcagctgctgaaagagcataacgctgaagtgactggcttcatccgcttcgaagtgggtgaaggcatcgagaaagttgagactgactttgcagcagaagttgctgcgatgtccaagcagtcttaattatcaaaaaggagccgcctgagggcggcttctttttgtgcccatcttgtaaattcagctaacccttgtggggctgcgctgaaaagcgacgtacaatgtcgctagtattaattcatttcaatcgttgacagtctcaggaaagaaacatggctaccaatgcaaaacccgtctataaacgcattctgcttaagttgagtggcgaagctctgcagggcactgaaggcttcggtattgatgcaagcatactggatcgtatggctcaggaaatcaaagaactggttgaactgggtattcaggttggtgtggtgattggtgggggtaacctgttccgtggcgctggtctggcgaaagcgggtatgaaccgcgttgtgggcgaccacatggggatgctggcgaccgtaatgaacggcctggcaatgcgtgatgcactgcaccgcgcctatgtgaacgctcgtctgatgtccgctattccattgaatggcgtgtgcgacagctacagctgggcagaagctatcagcctgttgcgcaacaaccgtgtggtgatcctctccgccggtacaggtaacccgttctttaccaccgacagtgcagcttgcctgcgtggtatcgaaattgaagccgatgtggtgctgaaagcaaccaaagttgacggcgtgtttaccgctgatccggcgaaagatccaaccgcaaccatgtacgagcaactgacttacagcgaagtgctggaaaaagagctgaaagtcatggacctggcggccttcacgctggctcgtgaccataaattaccgattcgtgttttcaatatgaacaaaccgggtgcgctgcgccgtgtggtaatgggtgaaaaagaagggactttaatcacggaataattcccgtgatggataaataagggtaagattccgcgtaagtatcgcgggggcgtaagtctggttataaggcgttattgttgcaggcagtttggtcacggccagcgcgcagcaaccggagcgtacaaaagtacgtgaggatggcgagcactgcccggggccaaaatggcaaataaaatagcctaataatccagacgattacccgtaatatgtttaatcagggctatacttagcacacttccactgtgtgtgactgtctggtctgactgagacaagttttcaaggattcgtaacgtgattagcgatatcagaaaagatgctgaagtacgcatggacaaatgcgtagaagcgttcaaaacccaaatcagcaaaatacgcacgggtcgtgcttctcccagcctgctggatggcattgtcgtggaatattacggcacgccgacgccgctgcgtcagctggcaagcgtaacggtagaagattcccgtacactgaaaatcaacgtgtttgatcgtagtatgtctccggccgttgaaaaagcgattatgacgtccgatcttggcctgaacccgaactctgcgggtagcgacatccgtgttccgctgccgccgctgacggaagaacgtcgtaaagatctgaccaaaatcgttcgtggtgaagcagaacaagcgcgtgttgcagtacgtaacgtgcgtcgtgacgcgaacgacaaagtgaaagcactgttgaaagataaagagatcagcgaagacgacgatcgccgttctcaggacgatgtacagaaactgactgatgctgcaatcaagaaaattgaagcggcgctggcagacaaagaagcagaactgatgcagttctgatttcttgaacgacaaaaacgccgctcagtagatccttgcggatcggctggcggcgttttgctttttattctgtctcaactctggatgtttcatgaagcaactcaccattctgggcagcaccggcagcattggttgcagcacgctggacgtggtgcgccataatcccgaacacttccgcgtagttgcgctggtggcaggcaaaaatgtcactcgcatggtagaacagtgcctggaattctctccccgctatgccgtaatggacgatgaagcgagtgcgaaacttcttaaaacgatgctacagcaacagggtagccgcaccgaagtcttaagtgggcaacaagccgcttgcgatatggcagcgcttgaggatgttgatcaggtgatggcagccattgttggcgctgctgggctgttacctacgcttgctgcgatccgcgcgggtaaaaccattttgctggccaataaagaaagtctggttacctgcggacgtctgtttatggacgccgtaaagcagagcaaagcgcaattgttaccggtcgatagcgaacataacgccatttttcagagtttaccgcaacctatccagcataatctgggatacgctgaccttgagcaaaatggcgtggtgtccattttacttaccgggtctggtggccctttccgtgagacgccattgcgcgatttggcaacaatgacgccggatcaagcctgccgtcatccgaactggagcatggggcgtaaaatttctgtcgatagcgctaccatgatgaacaaaggtctggaatacattgaagcgcgttggctgtttaacgccagcgccagccagatggaagtgctgattcacccgcagagtgtgattcacagtatggtgcgctatcaggacggcagtgttctggcgcagctgggggaaccggatatgcgtacgccaattgcccacaccatggcatggccgaatcgcgtgaactctggcgtgaagccgctcgatttttgcaaactaagtgcgttgacatttgccgcaccggattatgatcgttatccatgcctgaaactggcgatggaggcgttcgaacaaggccaggcagcgacgacagcattgaatgccgcaaacgaaatcaccgttgctgcttttcttgcgcaacaaatccgctttacggatatcgctgcgttgaatttatccgtactggaaaaaatggatatgcgcgaaccacaatgtgtggacgatgtgttatctgttgatgcgaacgcgcgtgaagtcgccagaaaagaggtgatgcgtctcgcaagctgaggataatccggctacagagagtcgcgctatttgttagcgtagggcttcagtgatatagtctgcgccatctgatcgtaagtagttggctttataaggtcagatatgccgtggttttacacggcttttttttgtataggcttcagtattcctgagtaccgtaaaccctgtcagggaataaaaaacgcgtgatgttgtctgctactcaaccacttagcgaaaaattgccagcgcatggctgccgtcatgttgcgatcattatggacggcaatggccgctgggcaaaaaagcaagggaagattcgtgcctttgggcataaagccggggcaaaatccgtccgccgggctgtctcttttgcggccaacaacggtattgaggcgttaacgctgtatgcctttagtagtgaaaactggaaccgaccagcgcaggaagtcagtgcgttaatggaactgtttgtgtgggcgctcgatagcgaagtaaaaagtctgcaccgacataacgtgcgtctgcgtattattggcgataccagtcgctttaacagccgtttgcaagaacgtattcgtaaatctgaagcgctaacagccgggaataccggtctgacgctgaatattgcggcgaactacggtggacgttgggatatagtccagggagtcaggcaactggctgaaaaggtgcagcaaggaaacctgcaaccagatcagatagatgaagagatgctaaaccagcatgtctgtatgcatgaactggcccctgtagatttagtaattaggactgggggggagcatcgcattagtaactttttgctttggcaaattgcctatgccgaactttactttacagatgttctctggcccgatttcgatgaacaagactttgaaggggcgttaaatgcctttgctaatcgagagcgtcgtttcggcggcaccgagcccggtgatgaaacagcctgatgggggtcgcttttgctgaagtatcgcctgatatctgcttttgtgttaatacccgtcgtcatcgcggcgttgtttctgttgccgccggtggggttcgccattgtaacgctggtggtctgcatgctggcagcgtgggaatggggacagcttagcggttttaccactcgtagccagcgagtatggttggcggtgttatgcgggttattgttggcgctgatgctttttctgttgccggaatatcaccgaaatattcatcaaccgctggttgaaatcagtctttgggctagcctgggttggtggattgtcgcgctattgctggtgctgttttacccaggttccgcagcaatctggcgtaactctaaaacattgcgccttatttttggcgtgctaaccattgttcccttcttctggggcatgctggcgttacgggcctggcactatgacgagaatcattacagtggcgcaatatggttgctctatgtcatgatcctggtatggggcgctgactccggcgcatatatgtttggcaaattgtttggtaaacataagctggcaccgaaggtttctccgggtaaaacctggcaaggctttatcggtggactcgctactgcagcggtaatcagttggggttatggcatgtgggcgaatctcgacgtcgctcccgtcaccttactcatttgctctattgtcgcagcgttagccagtgtgctcggcgatctgaccgagagtatgtttaagcgtgaagcaggaattaaggacagcggtcatttaattccaggacacggtggtattttagatcgtattgatagcctgacggctgcggtaccggtctttgcttgcttgttgttactggtattcaggacgctttaacggaaggtaatatgctgagttttctctgggatttggctagcttcatcgttgcactgggtgtacttatcaccgtgcatgaatttggtcatttctgggttgcccggcgttgtggtgttcgcgttgagcgtttcagtatagggtttggtaaggcgctctggcggcgaactgataagctcggcaccgaatatgttatcgccctgatcccgttgggcggttatgtcaaaatgctggatgagcgcgcagaaccggtcgttccggaactccgccaccatgccttcaataataaatctgtcggccaacgagcggcgattattgccgcaggtccggttgcaaacttcatttttgctatctttgcctactggctggtttttattattggtgtgcctggcgtacgtccggtggttggcgaaatagcagccaatagcatagctgcggaagcacaaattgcaccaggtacggaactaaaagccgtagatggtatcgaaacgcctgattgggatgccgtgcgtttgcagttggtcgataaaattggcgatgaaagcaccaccattacagtagcgccatttggcagcgaccaacggcgggatgtaaagctcgatttacgtcactgggcgtttgagcctgataaagaagatccggtatctagcctggggattcgtcctcgtgggccgcaaattgaacctgtactggaaaatgtgcagccaaacagcgcggcaagcaaggcaggtttgcaagcaggcgacaggatcgttaaagtcgatggtcagcccttaacgcagtgggtgacctttgtgatgcttgtccgggataacccgggtaaatccttagcgttagaaatcgaaaggcaggggagtcccttgtctttgacattaatcccggagagtaaaccgggtaatggtaaagcgattggttttgtcggtattgagccgaaagtcattcctttgccagatgagtataaagttgtacgccagtatgggccgttcaacgccatcgtcgaagccacggacaaaacgtggcagctgatgaagctgacggtcagtatgctgggaaaattgatcaccggtgatgtgaaactgaacaacctcagtgggccgatctctatcgccaagggggctgggatgacagcggaactcggggttgtttattacctgccgtttcttgcgcttattagcgtgaacttagggataattaacctgtttccgttgcccgtacttgacggggggcatctgctgttccttgcgatcgaaaagatcaagggcggaccggtatccgagcgggttcaagacttttgttatcgcattggcagcattctgctggtgctgttaatggggcttgcacttttcaatgatttctctcggttatgagagttagttaggaagaacgcataataacgatggcgatgaaaaagttgctcatagcgagcctgctgtttagcagcgccaccgtatacggtgctgaagggttcgtagtgaaagatattcatttcgaaggccttcagcgtgtcgccgttggtgcggccctcctcagtatgccggtgcgcacaggcgacacggttaatgatgaagatatcagtaataccattcgcgctctgtttgctaccggcaactttgaggatgttcgcgtccttcgtgatggtgatacccttctggttcaggtaaaagaacgtccgaccattgccagcattactttctccggtaacaaaagcgtgaaagatgacatgctgaagcaaaacctcgaggcttctggtgtgcgtgtgggcgaatccctcgatcgcaccaccattgccgatatcgagaaaggtctggaagacttctactacagcgtcggtaaatatagcgccagcgtaaaagctgtcgtgaccccgctgccgcgcaaccgtgttgacctaaaactggtgttccaggaaggtgtgagtgctgaaatccagcaaattaacattgttggtaaccatgctttcaccaccgacgaactgatctctcatttccaactgcgtgacgaagtgccgtggtggaacgtggtaggcgatcgtaaataccagaaacagaaactggcgggcgaccttgaaaccctgcgcagctactatctggatcgcggttatgcccgtttcaacatcgactctacccaggtcagtctgacgccagataaaaaaggtatttacgtcacggtgaacatcaccgaaggcgatcagtacaagctttctggcgttgaagtgagcggcaaccttgccgggcactccgctgaaattgagcagctgactaagatcgagccgggtgagctgtataacggcaccaaagtgaccaagatggaagatgacatcaaaaagcttctcggtcgctatggttatgcctatccgcgcgtacagagcatgcccgaaattaacgatgccgacaaaaccgttaaattacgtgtgaacgttgatgcgggtaaccgtttctacgtgcgtaagatccgttttgaaggtaacgataccagcaaagatgccgtcctgcgtcgcgaaatgcgtcagatggaaggtgcatggctggggagcgatctggtcgatcagggtaaggagcgtctgaatcgtctgggcttctttgaaactgtcgataccgatacccaacgtgttccgggtagcccggaccaggttgatgtcgtctacaaggtaaaagagcgcaacaccggtagcttcaactttggtattggttacggtactgaaagtggcgtgagcttccaggctggtgtgcagcaggataactggttaggtacaggttatgctgttggtatcaacgggaccaaaaacgattaccagacctatgctgaactgagcgtaaccaacccgtacttcaccgtagatggcgtaagcctcggtggtcgtctcttctataatgacttccaggcagatgacgccgacctgtccgactataccaacaagagttatggtacagacgtgacgttgggcttcccgattaacgaatataacagcctgcgtgcaggtctgggttatgtacataactccctgtccaacatgcagcctcaggttgcgatgtggcgttatctgtactctatgggtgaacatccgagcacctctgatcaggataacagcttcaaaacggacgacttcacgttcaactatggttggacctataacaagcttgaccgtggttacttcccgacagatggtagtcgtgtcaacctgaccggtaaagtgaccattcctggaagcgataacgaatactacaaagtgacgttagacacggcgacttatgtgccgatcgatgacgatcacaaatgggttgttctggggcgtacccgctggggttatggtgatggtttaggcggcaaagagatgccgttctacgagaacttctatgccggtggttccagcaccgtgcgtggcttccagtccaataccattggtccgaaagcagtttacttcccgcatcaggccagtaattatgatccggactatgattacgaatgtgcgactcaggacggcgcgaaagacctgtgtaaaagcgatgatgctgtaggcggtaacgccatggcggttgccagcctcgagttcatcaccccgacgccgtttattagcgataagtatgctaacagcgttcgtacttccttcttctgggatatgggtaccgtttgggatacaaactgggattccagccaatattctggatatccggactatagtgatccaagcaatatccgtatgtctgcgggtatcgcattacaatggatgtccccattggggccgttggtgttctcctacgcccagccgttcaaaaagtacgatggagacaaggcagaacagttccagtttaacatcggtaaaacctggtaagtgttctccacaaaggaatgtagtggtagtgtagcgatgactttaggcgatcaatataagatcgccgggccacgcaaagaactgcaccctccggtgcaaatgggatggtaaggagtttattgtgaaaaagtggttattagctgcaggtctcggtttagcactggcaacttctgctcaggcggctgacaaaattgcaatcgtcaacatgggcagcctgttccagcaggtagcgcagaaaaccggtgtttctaacacgctggaaaatgagttcaaaggccgtgccagcgaactgcagcgtatggaaaccgatctgcaggctaaaatgaaaaagctgcagtccatgaaagcgggcagcgatcgcactaagctggaaaaagacgtgatggctcagcgccagacttttgctcagaaagcgcaggcttttgagcaggatcgcgcacgtcgttccaacgaagaacgcggcaaactggttactcgtatccagactgctgtgaaatccgttgccaacagccaggatatcgatctggttgttgatgcaaacgccgttgcttacaacagcagcgatgtaaaagacatcactgccgacgtactgaaacaggttaaataagtaatgcctagtattcgactggctgatttagcgcagcagttggatgcagaactacacggtgatggcgatatcgtcatcaccggcgttgcgtccatgcaatctgcacaaacaggtcacattacgttcatggttaacccaaaataccgtgagcatttaggcttgtgccaggcgtccgcggttgtcatgacccaggacgatcttcctttcgcgaaaagtgccgcactggtagtgaagaatccctacctgacttacgcgcgcatggcgcaaattttagataccacgccgcagcccgcgcagaacattgcacccagtgcggtgatcgacgcgacggcgaagctgggtaacaacgtaagcattggcgctaacgcggtgattgagtccggcgttgaactgggcgataacgtgattatcggtgccggttgcttcgtaggtaaaaacagcaaaatcggtgcaggtagccgtctctgggcgaacgtaaccatttaccatgagatccagatcggtcagaattgcctgatccagtccggaacagtggtaggcgcagacggctttggttatgccaacgatcgtggtaactgggtgaagatcccacagattggtcgcgtaattattggcgatcgcgtggagatcggtgcctgcacaaccatcgatcgcggcgcgctggatgacactattattggcaatggcgtgatcattgataaccagtgccagattgcacataacgtcgtgattggcgacaatacggcggttgccggtggcgtcattatggcgggcagcctgaaaattggtcgttactgcatgatcggcggagccagcgtaatcaacgggcatatggaaatatgcgacaaagtgacggttacgggcatgggtatggtgatgcgtcccatcactgaaccaggcgtctattccagtggcattccgctgcaacccaacaaagtctggcgcaaaaccgctgcactggtgatgaacattgatgacatgagcaagcgtctgaaaagccttgagcgcaaggttaatcaacaagactaacgttccatcttttgttcgccaaactttacggcctgtctcattcttacgattgcggcaggccgtgttattattgtcgtttcttatattttgacaggaagagtatcttgactactaacactcatactctgcagattgaagagattttagaacttctgccgcaccgtttcccgttcttactggtggatcgcgtgctggattttgaagaaggtcgttttctgcgcgcagtaaaaaatgtctctgtcaatgagccattcttccagggccatttccctggaaagccgattttcccgggtgtgctgattctggaagcaatggcacaggcaacaggtattctggcgtttaaaagcgtaggaaaactggaaccgggtgagctgtactacttcgctggtattgacgaagcgcgcttcaagcgcccggtcgtgcctggcgatcaaatgatcatggaagtcactttcgaaaaaacgcgccgcggcctgacccgttttaaaggggttgctctggtcgatggtaaagtagtttgcgaagcaacgatgatgtgtgctcgtagccgggaggcctgatacgtgattgataaatccgcctttgtgcatccaaccgccattgtggaagagggcgcgagtattggcgcgaacgcacacattggtcctttttgtatcgttggaccccatgtcgaaattggtgagggtaccgtactgaaatctcacgttgtcgtgaatggtcatactaaaattggccgcgataatgagatttatcagttcgcctccatcggcgaagttaaccaggatctgaaatatgctggcgaaccgacccgtgtggaaatcggcgatcgtaaccgcattcgcgaaagcgtcaccattcatcgtggcacagtccagggcggtggattgacgaaggtgggcagcgacaacttactgatgatcaacgcgcacattgcgcacgattgtacggtaggtaaccgctgtattctcgccaacaacgcaacgctggcgggtcacgtaagcgttgacgacttcgcgatcatcggcggcatgaccgcagtccatcagttctgcatcattggtgcgcacgtgatggttggcggctgctccggtgtggcgcaggacgtccctccttatgtcattgcgcagggtaaccacgcaacgccgttcggtgtcaatatcgaagggctgaagcgccgcggattcagccgtgaggcgattaccgctatccgcaatgcgtataagctgatttatcgtagcggtaaaacgctcgatgaagtgaaaccggaaattgctgaactggcggaaacatatccggaagtgaaagcctttaccgatttctttgcacgcagtacgcgcggtctgattcgttaatgactgaacagcgtccattaacgattgccctggtcgccggagaaacctccggcgatatcctgggggccggtttaatccgcgctctgaaagaacatgtgcccaacgcccgctttgttggtgttgccgggccacgaatgcaggctgaaggctgcgaagcctggtacgaaatggaagaactggcggtgatgggcattgttgaagtgctcggtcgtctgcgtcgcttactgcatattcgtgccgatctgacaaagcgttttggcgaactgaagccagatgtttttgttggtattgatgcgcctgacttcaatattactcttgaaggtaacctcaaaaagcagggtatcaaaaccattcattacgtcagtccgagtgtctgggcgtggcgacagaaacgtgttttcaaaataggcagagccaccgatctggtgctcgcatttctgcctttcgaaaaagcgttttatgacaaatacaacgtaccgtgccgctttatcggtcataccatggctgatgccatgccattagatccagataaaaatgccgcccgtgatgtgctggggatccctcacgatgcccactgcctggcgttgctaccggggagccgtggtgcagaagttgaaatgcttagtgccgatttcctgaaaacggcccagcttttgcgccagacatatccggatctcgaaatcgtggtgccactggtgaatgccaaacgccgcgagcagtttgaacgcatcaaagctgaagtcgcgccagaccttagtgttcatttgctggatgggatgggccgtgaggcgatggtcgccagcgatgcggcgctactggcgagcggtacggcagccctggagtgtatgctggcgaaatgcccgatggtggtgggatatcgcatgaagccttttaccttctggttggcgaagcggctggtgaaaactgattatgtcagcctgccaaatctgctggcgggcagagagttagtcaaagaattattgcaggaagagtgtgagccgcaaaaactggctgcggcgctgttaccgctgttggcgaacgggaaaaccagccacgcgatgcacgataccttccgtgaactgcatcagcagatccgctgcaatgccgatgagcaggcggcacaagccgttctggagttagcacaatgatcgaatttgtttatccgcacacgcagctggttgcgggtgtggatgaagtcggacgcgggccgttagttggcgcggtcgtcaccgctgcggtgatccttgacccggcgcgcccgattgccgggctgaatgattccaaaaagctgagcgaaaaacgccgtctggcgctctatgaagagatcaaagagaaagcgttgagctggagtctgggccgcgcggaaccccacgaaatcgacgagctgaacattcttcatgcgaccatgctggcgatgcagcgtgccgtcgctgggctgcatattgcgccggaatatgtgttgattgatggtaaccgctgcccgaaattaccgatgcctgcgatggctgtggtgaaaggcgatagccgcgtaccggaaatcagtgccgcgtctatcctggcgaaagtgacgcgtgacgccgaaatggcggcgctggatattgttttcccgcaatatggttttgcccaacacaaagggtacccaaccgcttttcatctggaaaaactggctgaacacggcgcgaccgaacaccatcggcgcagctttgggcctgtcaaacgcgcactgggacttgcgtcctgattcttgtgtcgagattaagtaaaccggaatctgaagatgtctgaaccacgtttcgtacacctgcgggtgcacagcgactacagcatgatcgatggcctggccaaaaccgcaccgttggtaaaaaaggcggcggcgttgggtatgccagcactggcgatcaccgatttcaccaacctttgtggtctggtgaagttctacggagcgggacatggcgcagggattaagcctatcgtcggggcagattttaacgtccagtgcgacctgctgggtgatgagttaacccacctgacggtactggcggcgaacaataccggctatcagaatctgacgttgctgatcagtaaagcgtatcagcgcgggtacggtgccgccgggccgatcatcgatcgcgactggcttatcgaattaaacgaagggttgatccttctttccggcggacgcatgggcgacgtcggacgcagtcttttgcgtggtaacagcgcgctggtagatgagtgtgtcgcgttttatgaagaacacttcccggatcgctattttctcgagctgatccgcaccggcaggccggatgaagaaagctatctgcacgcggcggtggaactggcggaagcgcgcggtttgcccgtcgtggcgaccaacgacgtgcgctttatcgacagcagcgactttgacgcacacgaaatccgcgtcgcgatccacgacggctttaccctcgacgatcctaaacgcccgcgtaactatagcccgcagcaatatatgcgtagcgaagaggagatgtgtgagctgtttgccgacatccccgaagcccttgccaacaccgttgagatcgccaaacgctgtaacgtaaccgtgcgtcttggtgaatacttcctgccgcagttcccgaccggggacatgagcaccgaagattatctggtcaagcgtgcaaaagagggcctggaagagcgtctggcctttttattccctgatgaggaagaacgtcttaagcgccgcccggaatatgacgaacgtctggagactgaacttcaggttatcaaccagatgggcttcccgggctacttcctcatcgttatggaatttatccagtggagcaaagataacggcgtaccggtagggccaggccgtggctccggtgcgggtagtctggtggcctacgcgctgaaaatcaccgacctcgatccgctggaatttgacctgctgttcgaacgtttccttaacccggaacgtgtctccatgcctgacttcgacgttgacttctgtatggagaaacgcgatcaggttatcgagcacgtagcggacatgtacggtcgtgatgcggtaagccagatcatcaccttcggtacaatggcggcgaaagcggtgatccgcgacgtaggccgcgtgctggggcatccgtacggctttgtcgatcgtatcagcaaactgatcccgcccgatccggggatgacgctggcgaaagcgtttgaagccgagccgcagctgccggaaatctacgaagcggatgaagaagttaaggcgctgatcgacatggcgcgcaaactggaaggggtcacccgtaacgccggtaagcacgccggtggggtggttatcgcgccgaccaaaattaccgattttgcgccgctttactgcgatgaagagggcaaacatccggtcacccagtttgataaaagcgacgttgaatacgccggactggtgaagttcgacttccttggtttgcgtacgctcaccatcatcaactgggcgctggagatgatcaacaagcggcgggcgaagaatggcgagccgccgctggatatcgctgcgatcccgctggatgataagaaaagcttcgacatgctgcaacgcagcgaaaccacggcggtattccagcttgaaagccgcggcatgaaggacctgatcaagcgtctacaacctgactgcttcgaagatatgatcgccctagtggcactgttccgccccggtccgttgcaaagtgggatggtggataactttatcgaccgtaaacatggtcgtgaagagatctcctatccggacgtacagtggcagcatgaaagcctgaaaccggtactggagccaacctacggcattatcctgtatcaggaacaggtcatgcagattgcgcaggtgctttctggttataccctcggtggcgcggatatgctgcgtcgtgcgatgggtaagaaaaagccggaagagatggctaagcaacgttctgtatttgctgaaggtgcagaaaagaacggaatcaacgctgaactggcgatgaaaatcttcgacctggtggagaaattcgctggttacggatttaacaaaagccactctgcggcctatgctttggtgagttatcaagcgttatggctgaaagcgcactatcctgcggagtttatggcggcggtaatgaccgccgatatggacaacaccgagaaggtggtgggtctggtggatgagtgctggcggatggggctgaaaatcctgccaccagatataaactccggtctttaccatttccacgtcaacgacgacggcgaaatcgtgtatggtattggcgcgatcaaaggggtcggtgaaggtccgattgaggccatcatcgaagcccgtaataaaggcggctacttccgcgaactgtttgatctctgcgcccgtaccgacaccaaaaagttgaaccgtcgcgtgctggaaaaactgatcatgtccggggcgtttgaccgtcttgggccacatcgcgcagcgctgatgaacagcctgggcgatgcgttaaaagcggcagatcaacacgcgaaagcggaagctatcggtcaggccgatatgttcggcgtgctggccgaagagccggaacaaattgaacaatcctacgccagctgccaaccgtggccggagcaggtggtattagatggggaacgtgaaacgttaggcctgtacctgaccggacaccctatcaaccagtatttaaaagagattgagcgttatgtcggaggcgtaaggctgaaagacatgcacccgacagaacgtggtaaagtcatcacggctgcggggctcgttgttgccgcgcgggttatggtcaccaagcgcggcaatcgtatcggtatctgcacgctggatgaccgttccgggcggctggaagtgatgttgtttactgacgccctggataaataccagcaattgctggaaaaagaccgcatacttatcgtcagcggacaggtcagctttgatgacttcagcggtgggcttaaaatgaccgctcgcgaagtgatggatattgacgaagcccgggaaaaatatgctcgcgggcttgctatcagcctgacggacaggcaaattgatgaccagcttttaaaccgactccgtcagtctctggaaccccaccgctctgggacaattccagtacatctctactatcagagggcggatgcacgcgcgcggttgcgttttggcgcgacgtggcgtgtctctccgagcgatcgtttattaaacgatctccgtggcctcattggtagcgagcaggtggaactggagtttgactaatacaggaatactatgagtctgaatttccttgattttgaacagccgattgcagagctggaagcgaaaatcgattctctgactgcggttagccgtcaggatgagaaactggatattaacatcgatgaagaagtgcatcgtctgcgtgaaaaaagcgtagaactgacacgtaaaatcttcgccgatctcggtgcatggcagattgcgcaactggcacgccatccacagcgtccttataccctggattacgttcgcctggcatttgatgaatttgacgaactggctggcgaccgcgcgtatgcagacgataaagctatcgtcggtggtatcgcccgtctcgatggtcgtccggtgatgatcattggtcatcaaaaaggtcgtgaaaccaaagaaaaaattcgccgtaactttggtatgccagcgccagaaggttaccgcaaagcactgcgtctgatgcaaatggctgaacgctttaagatgcctatcatcacctttatcgacaccccgggggcttatcctggcgtgggcgcagaagagcgtggtcagtctgaagccattgcacgcaacctgcgtgaaatgtctcgcctcggcgtaccggtagtttgtacggttatcggtgaaggtggttctggcggtgcgctggcgattggcgtgggcgataaagtgaatatgctgcaatacagcacctattccgttatcagcccggaaggttgtgcgtccattctgtggaagagcgccgacaaagcgccgctggcggctgaagcgatgggtatcattgctccgcgtctgaaagaactgaaactgatcgactccatcatcccggaaccactgggtggtgctcaccgtaacccggaagcgatggcggcaagcttgaaagcgcaactgctggcggatctggccgatctcgacgtgttaagcactgaagatttaaaaaatcgtcgttatcagcgcctgatgagctacggttacgcgtaattcgcaaaagttctgaaaaagggtcacttcggtggcccttttttatcgccacggtttgagcaggctatgattaaggaaggattttccaggaggaacacatgaacatcattgccattatgggaccgcatggcgtcttttataaagatgagcccatcaaagaactggagagcgcgctggtggcgcaaggctttcagattatctggccacaaaacagcgttgatttgctgaaatttatcgagcataaccctcgaatttgcggcgtgatttttgactgggatgagtacagtctcgatttatgtagcgatatcaatcagcttaatgaatatctcccgctttatgccttcatcaacacccacagcacgatggatgtcagcgtgcaggatatgcggatggcgctctggttttttgaatatgcgctggggcaggcggaagatatcgccattcgtatgcgtcagtacaccgacgaatatcttgataacattacaccgccgttcacgaaagccttgtttacctacgtcaaagagcggaagtacaccttttgtacgccggggcatatgggcggcaccgcatatcaaaaaagcccggttggctgtctgttttatgatttttcggcgggaatactcttaaggctgatgtctctattagcgtcaccgagcttggtagcttgctcgaccacaccgggccacacctggaagcggaagagtacatcgcgcggacttttggcgcggaacagagttatatcgttaccaacggaacaagcacgagcaacaaaattgtgggtatgtacgccgcgccatccggcagtacgctgttgatcgaccgcaattgtcataaaagcctggcgcatctgttgatgatgaacgatgtagtgccagtctggctgaaaccgacgcgtaatgcgttggggattcttggtgggatcccgcgccgtgaatttactcgcgacagcatcgaagagaaagtcgctgctaccacgcaagcacaatggccggttcatgcggtgatcaccaactccacctatgatggcttgctctacaacaccgactggatcaaacagacgctggatgtcccgagcattcacttcgattctgcctgggtgccgtacacccattttcatccgatctaccagggtaaaagtggtatgagcggcgagcgtgttgcgggaaaagtgatcttcgaaacgcaaagcacccacaaaatgctggcggcgttaagccaggctagcctgatccacattaaaggcgagtatgacgaagaggcctttaacgaagcctttatgatgcataccaccaccagccccagttatcccattgttgctagcgttgagacggcggcggcgatgctgcgtggtaatccgggcaaacggctgattaaccgtagtgtagaacgagctctgcattttcgcaaagaggtccagcggctgcgggaagagtctgacggttggtttttcgatatctggcaaccgccgcaggtggatgaagccgaatgctggcccgttgcgcctggcgaacagtggcacggctttaacgatgcggatgccgatcatatgtttctcgatccggttaaagtcactattttgacaccggggatggacgagcagggcaatatgagcgaggaggggatcccggcggcgctggtagcaaaattcctcgacgaacgtgggatcgtagtagagaaaaccggcccttataacctgctgtttctctttagtattggcatcgataaaaccaaagcaatgggattattgcgtgggttgacggaattcaaacgctcttacgatctcaacctgcggatcaaaaatatgctacccgatctctatgcagaagatcccgatttctaccgcaatatgcgtattcaggatctggcacaagggatccataagctgattcgtaaacacgatcttcccggtttgatgttgcgggcattcgatactttgccggagatgatcatgacgccacatcaggcatggcaacgacaaattaaaggcgaagtagaaaccattgcgctggaacaactggtcggtagagtaagcgcaaatatgatcctgccttatccaccgggcgtaccgctgttgatgcctggagaaatgctgaccaaagagagccgcacagtactcgattttctactgatgctttgttccgtcgggcaacattaccccggttttgaaacggatattcacggcgcgaaacaggacgaagacggcgtttaccgcgtacgagtcctaaaaatggcgggataacttgccagagcggcttccgggcgagtaacgtgctgttaacaaataaaggagacgttatgctgggtttaaaacaggttcaccatattgcgattattgcgacggattatgcggtgagcaaagctttctactgcgatattcttggtttcacgctgcaaagcgaagtctatcgcgaagcgcgcgacagttggaaaggggatttggcgcttaatgggcaatatgtgattgagcttttcagttttccgttcccgccggaacgacccagccgaccggaagcttgcggtctgcgtcatctggcttttagcgttgatgacatcgatgcggcagtggcgcaccttgaaagccataacgtgaagtgtgaaaccatccgtgtcgatccatacacgcaaaaacgcttcaccttctttaacgatccggacgggctgccgttggaactgtatgagcagtaaggcttgtcatcgccgcatttgcccggtaacgtgccgggcattgctactgtaaaatcgcaccatcatgacactcacgctcaatagacaacttctcaccagtcgccagattctggtggcctttagcggcgggcttgactccaccgttctgctgcatcagttggtgcagtggcggacggaaaatccgggtgtcgctctgcgcgctattcatgtgcatcacggtttaagtgccaatgccgatgcctgggttacgcattgcgaaaacgtctgccaacagtggcaggtgccgctggtggtcgaacgcgtacaacttgcgcaagaaggactgggcattgaggcccaggcgcggcaggcacgttatcaggcatttgcccgcaccttgttgcccggtgaagtgctggtcaccgcgcaacatctcgacgatcaatgtgaaacctttctgctggcgctaaaacgcggcagtggccctgccgggcttagcgctatggcggaagtcagcgagtttgccggaacgcggcttattcgcccgttgctcgcccgcacgcggggggaactggtgcagtgggcgcgtcagtatgatttacgctggattgaagacgaaagtaatcaggacgacagttacgatcgtaactttctgcgcctgcgcgtagtgccgttattgcagcagcgttggccgcattttgccgaagcaacggcccgcagcgccgcactttgtgctgaacaagagagcctgctggatgaactgctggcagatgatttagcacactgtcaaagcccgcaggggacgctgcagattgtgccaatgctggcgatgagtgatgcccgccgcgcggcgattatccgccgctggctggcagggcagaatgcaccgatgccttcccgcgacgcgttggtgaggatctggcaggaagtggcgctggcgcgggaagatgccagtccctgtttacgtttgggcgcgtttgaaatccgacgctatcagagccaactgtggtggattaaatccgtcaccgggcaaagcgaaaacattgtgccgtggcagacgtggcttcaaccgctggaattaccggcggggctgggaagtgtacagcttaatgcgggaggcgatattcgccctccgcgtgcagacgaagcggtcagcgtgcgtttcaaagcgccaggattgctgcatattgtcgggcgtaacggcggacgtaagctaaagaaaatctggcaagagctgggcgtgccgccgtggctacgtgacaccacgccactgctgttttatggcgaaacgctgattgcggcggcaggggtatttgtgacgcaagaaggtgtggctgaaggtgagaatggcgtaagttttgtctggcagaaaacgcttagttaagtgaaagccggataagacgcatcaaacgtcgcatccggcgaaagtcaatcaggattcgcttaccaccaccgtaccgatttccgggtggctaaagctggtaattttatccagacgcagctcgcgggtttcgccagcggcctcgacgaccaggtactccacatttttgcgggagactaaatcactggcttttgcctgcaatttttcgccatctttcagctcaagtgtcagcattaaatgatgctggcaggcgagctcaagattatcgtaatcatcacaattgattggttgatacgtatcattcattgacataatcgctcaccagtaagtttgccgcagcgtatgctgctttttccctgacagcctcagaaagggcgtcgtcggcagccatttcattcagcactttcaaaacgcagcccagcgcgtccggaacgtatcctaagtctccgctggcgatttccgcgtaccgcttgcgtattaactcacaatatttttccacatgccctcctgtcagcactctgacttaaccgtggatgcaagtctaagcctacgaagataaactctgtttcgcaaggtgactataccacactcatttctgcaatatcagcgccgcaactgcacgtattccgttacaatggcctcctgattcgaaaggagttttcttatggcgcttaaagcgacaatttataaagcgacggttaatgtggccgatctcgaccgcaaccagtttctcgatgcctctctgacgctggcgcgccatcctagtgaaacccaggagcgtatgatgctgcgcttgctggcgtggctgaaatatgctgatgaacgtctgcaatttacccgtggtttgtgtgccgatgatgagccggaagcgtggctgcgtaacgatcacctgggcattgatttgtggattgagctggggctgccggatgagcggcggattaagaaagcctgcacccaggccgcagaagtggcgctgtttacctataatagtcgggcggcgcaaatctggtggcagcaaaatcagagcaaatgtgtgcagtttgccaatctttccgtctggtatctggacgatgaacaactggcgaaagtaagcgcctttgccgatcgtaccatgacgctgcaggcaacgattcaggatggcgtgatctggttaagcgatgataagaataatctggaagtgaacttaaccgcctggcaacaacctagttgaactaaaccgcctggcaacaaccttcatgattgtgatttcccgacatgttgctattcccgatggtgagcttgagatcaccgccattcgtgcgcagggcgcgggcgggcagcatgttaataagaccagtacggctattcatctgcgttttgacattcgggcgtccagcctgccagagtattacaaagagcgtctgctcgccgccagccatcatttgatcagcagtgatggcgtgattgtcattaaggcacaggaataccgcagtcaggaactgaaccgcgaagcagctctggcccggctggtggctatgattaaagaattaacaacagaaaaaaaagcccgacgacccacgcggcccacccgtgcaagcaaagagcgcaggctggcaagcaaagcacaaaaaagtagcgtgaaggcgatgcgcggcaaagtgcgcagcggtcgggaataaaaagaaggaatggatggtgaaaaaagcgatagtgacagcgatggctgtaatcagcctctttactctgatgggatgtaataatcgggccgaagtcgatacgctttctccggcgcaggctgccgaactgaaaccgatgccgcaaagttggcgcggcgtgctgccgtgtgccgattgcgaaggaatcgaaacctctctgttcctcgaaaaagacggaacatgggtgatgaatgagcgttatctcggtgctcgtgaagaaccttcctccttcgcttcctacggtacatgggcgcgaaccgctgacaagctggtattaaccgacagcaaaggtgaaaagagttattatcgggcgaaaggcgatgcgctggagatgctcgatcgtgaaggcaatccgattgaaagccagttcaactatacgctggaagcggcacaatccagtttacctatgacgccgatgaccctgcggggcatgtatttttatatggctgatgcggcgaccttcactgattgcgcgaccggaaaacgtttcatggtagcgaataacgcagagctggagcgtagctacctggctgcgcgcggtcacagtgaaaaaccggtgttactgagtgtagaaggtcactttacgcttgagggtaatccggataccggtgcgccgactaaagtattggcacccgatacggcagggaaattttaccccaaccaggattgcagtagtttggggcagtaacccgtcttgagacagaaacaaacgcaaaacaggccagaaggatatatttcaacattttgaatttgcacgttttttgtaggccggataaggcgtttacgccgcatccggcaatggtgctcaacgcctgatgcgacgctggcgcgtcttatcatgcctacgacccccctcataccttaaggcggataaggcatttactttatcaccgggtcaaaccaacaaagcgacccgccttgatataaatcccaggcttcaggtgcccaacatactgtaactgcgtttctggcttaaacgcagagacatcaccaatacgcatatgcatcagatcggcagggctaatccagccgctttgcgccagtgtaagtggatgcccggctttggcaaaggcatccgtgacaaattcgctacaaaaccagctctttttgtctccttcgcccacactgcttaactgcgctttcgccaggccgctgacgcactgttggcgaaaatcctcggagaacggattcagactgcacatctggcgagtcaccataaagggaataaattcgacaatgccgcgatagttataaccgctatctttgattttattggcaaacgcggtgatatctgtggcttgttgcggggtaagatccgggactcgtaagacgaaaagcttatcactatgcttcatcgcttttttaagggaaacgatctggacgccagcgcctgtcgcttctgcaacgttattatcacccagaaagattgcaacgtgactcacagaggaagtgctgaagacgcggattccaaaactggttaccccaaggctactggagaacagcaaatcgccgggtttgagatcaggtgccgttatttcttttatactttgttcggtgaaagagctttgatgctggaatttgacagcccatgtttttgcctcggcatctactgctgtggcacttgggtctggctggctgatatcaacggtacaagcgctaagtaaaagaaagctggggagaaacaggcggcagtacgcctttggtttatccattttatacaatccatgtaaaaaaagggccctgaaattcaggaccctttctggcatcagcctttaatctgtttcaccagatattcgacgatgtcaccagtcttaattaactgtttctcgccgttgcgacgatatttatattcgatatcgtcgttgtcgaggttacggtcgcccagcacaatagtgtgcggaataccgatcagttccatatcagcaaacatcacgcccggacgctctttgcggtcatccagcagcacttcgataccttgtgcacgcagttcgctgtacagtttctcagcaagctcttgtacgcggaaggatttgtgcatgttcatcggcagaatcgccacctggaacggcgcgatagcgtcaggccatacgatgcctcgttcgtcgtagttctgctcaatcgccgcagctaccacacgcgttaccccgataccgtagcaacccatcgtcaggatttggttgcggccatcttcaccctgtacggaggctttcagtgcttcggagtacttggtacccagctggaagatgtgaccaacttcgataccacgtttgatcagcagcctaccctggccatccgggcttggatcgccagccaccacgttacggatatctgcaacttccggggtagcgacatcgcgatcccagttgatgccgaagtagtgtttaccatcgatgttagcaccagcagcgaaatcactcatcgccgcaacggtacggtcaatcaccaccggaatcggcatgtttaccggacccagactacccggaccggctttaaccacggcacgaatttcttcttcggtcgcgaaagtcagcgggcttgcaacctgcggcagtttttctgctttaacttcgttcagctcgtgatcaccgcgcaccagcagcgcaacctgcgggaagctgctgccttcaaccgctttaaccagcagagtcttaaccgttttctcaatcggcagattgaactgttcaaccagttccgcgatggttttcgcgttcggcgtatcaaccagcgtcatttcctgggtagcagcagcgcgcggttctttcggcgcgatagcttctgccagttcaatgttcgctgcatagtcagaggtgtcggagaagaccacatcgtcttcaccgctctgcgccagcacctggaattcgtgagaggcgctgccgccgatagaaccggtgtcggcttgtacggcgcggaaatccagccccatgcggctgaagattttgctgtaggccgcatacattgcatcgtaggtttcctgcagggattcctgagaagtatggaaagagtaagcatctttcatcaggaattcgcgggaacgcatgacgccgaaacgcggacgcacttcgtcgcggaacttggtctggatctgatagaagttcagcggcagctgtttgtaagagctaagctcgttacgaatcaggtcagtgataacttcttcatgagttgggccgagtacgaacggacgctcgccacggtcaacaaaacgcagcagttccggaccgtactgttcccaacgaccactctcttgccacaaatcggctggctgaaccaccggcatgctcacctcgatcgcaccggcgttgttcatctcttcacgcacgatgttttcgacttttttcagaacgcgcacgccggtcggcagccaggtatataacccggaggccagcttgcggatcatcccggcgcgcagcatcagctgatggctgatcacctcggcgtcggcaggtgtctccttgagagtggagagcaggtattggctagtacgcatgttgttacggttccagttggaaggtagaacaggctcaaggcgagcctgggacaaaaaaagtgatttagtttaccagtgcaaaagaaatgtcaaaagagaagggcgtgaatttaacgcggttccagcgcaaagacttcaaaacctgcgtcggtgacgcgccagcgaacgttaaaatcatgtagccagacggcataggttttgcccgtttcctcacctttacgataggccgggcgcgggtcctgcgccagtacttcgcggataaacagcgttaactgcggataacgcttctccagcgtcaaaagctgcttttcgacctctgcggtaaaactcaccgccatctctgcagctggcgcactttgcgcatagctggcactggcatcgggaaggctttcggcaaaggggagatacggtttgatatccactaccggcgtaccatcgaccagatccagactgccgagcttcagaatcacgctgtctttatggcaaacaacctctttcagctctaccaggctcatgccaattgggttagggcggaaagtagagcgtgttgcgaaaacccccattctggcgttaccgccgaggcgcggtggacgcacagtcggacgccagccgccttccatcgtttgatgaaagacgaaaaggatccataaatggctgaacgcttccaggccgcgaacggcgtcggcctggttgtagggagcaatgagatgcagttcgccgttggcgctttttaccagacctggctggcgcggaacggcgaacttttctttataggggctgcgaataacgcctatttgctcgaactggaaactgctcatttcgccgtaatgttaagcgcagaaccgatacatacagcctgacgatagcagcctggcgtaccgctggtgacttcgcagctatgcagtaatacagcattggctttcattttagaggcgttgatttgcatccgcttacgtgcggttggaatgctcggcggagagtcctgattagaggcctggcaagagtcgccactgacttcaccgagatcgcggaacggtttgccgactaattcttctgcattggtataaattcggaccggcgtggcgcgcggcgctttcggttttgcaggctccgctttcggctggggtgcagtgctttgaacgggttcgacaggggatctgcttaacatggaacagccgcttagcatgagtgctactaaacagatcggtaaagcacgcatagtatttcctcaatgtatgatcaaaacgtcaatattgaatcaggagcttgtaaaaatgacaagacgggcaagcgcccgtcctgaatgatattacaaattgtggaaacagcctaaaaattaccagcctttaacagctccgccgttaaacactttgtttgctgcttcgtaaacttcgtcagactgataagcctggacgaatttcttcacgttctcggcgtctttgttatcttcacgcgtcacgatcaggtttacgtacggggactctttatcttcaacaaagataccgtctttcgccggagtcaggccaatctggctggcataggtggtattgataactgccagagcgatttgcgcgtcgtccagagaacgcggcagttgcggtgcttccagttcaacaattttcagatttttggggttctcaacaacatcaagaacggtcggcagcaggccaacgccatctttcagtttgatcaagcccactttttgcagcagcagcagactacgaccaaggttagttgggtcgtttggcacggcaacctggctaccatcctgcagttcatccagacttttgattttcttggagtaaccagcaatcggataaacaaaagtgttgcctactgcgaccagtttgtagccacgatctttcagttgctgatcaaggtacggtttatgctggaaggcgttggcgtcgatatcgcctttgctcaatgcttcgtttggcagaacatagtcgttgaaggttaccagctcaacgtccaggccatatttgtctttcgcaactttctgcgcgacttctgcaacctgctgttcggcaccaacaatcacgccgactttaatgtggtttggatctttttcatcctgaccgcagcctaccagtgccagacttccgatcagggctcccactgccgcaaaggttttgaatttgaacgccataccttattccttcttcaattatttatgttgtgttgaacgttacttgcgagtgacagcccggacgatgcggtcgcctgcgaactgaattaaataaaccagaatgaccagcaataccagtaccgtattcatcaccgtcgcgttatagccgatgtagccatactgatagccaatctgacctaaaccaccggcaccgactgcaccacccatcgcggaataaccgaccagggtaatcagggtgatagttgccgcattcaccagacccggcagcgcttccggtaacagcaccttacggacgatctgcatcggcgtggcacccattgcgcgggaagcttcaattaacccggttgggatctccagcagagcgttctcgaccatacgggcaataaacggtgctgcaccaacggttaacggaacaatcgctgcctgcaaaccaatgcttgtaccgacaataacgcgggtaaacggaatcatccatacaagcaagataatgaacgggatggaacggaaaatgttcacaatcgcagaaacggtacgatacagcttcgcgttagcaataatttgccccggacgcgtgacataaagcagaacgccaaccggcagaccaatcacaaagccaaaaaaaccggatacgaaggtcattgccagcgtttcccatacgccacgaaccagcagccacatcatcggctcagacataacccagtacctctacttttacatggtgttcctgcagccaggcaatggcggcttgcgtatcttgttgtgtgccgtgcatttcagtcagcatgatgccgaacttaacgccaccggcgtaatccatctgcgcgctaataatgttgttgttgacgttgaaacgacgcgcggtttcagaaagcagtggggcatcgacgctttgaccggtaaactccagacgcagcatcggcacgcagtcagtaaatggctccgcttgcagacgttcctggtaatcttccgggatatccagatgcagggtgctctgaataaacttctgcgccagcggcgttttcggatggctgaacacttcacttaccgtgtcctgctcgatcagttctccattgctgatgaccgccacgcaatcacaaatgcgcttcacaacgtccatttcgtgggtgatcaacagaatcgtcaaccccagacggcggttgatgtctttcagcagttcgagaatagaacgtgtcgttgccgggtccagcgcgctggtggcttcatcacacagcaatactttgggattgctggctaacgcacgggcaattgccacacgttgtttctgcccaccggaaagattgctcgggtagctatcatgcttatcgccaagaccaaccaaactcagcaattccgtcacgcgacgtttgacctcgtctttcggtgtgttgtccagctccagcggcagagccacgttgccaaaaacagtacggctagagagcaggttaaaatgctggaaaatcataccaatctggcggcgagctttggtcaactcggattcactcagcgtggtcagttcctggccatcgaccagcacgctaccctcggttgggcgctccagcaggtttacacaacgtataagcgtactcttacccgcgccactggcaccgataacgccataaatttgtccagctggcacatgcaggctgacgttgttcaacgcctggatggtgcgggtgccctggtggaacactttggtgatattgctaagttttatcattgattatttattatcgtcattaagttagtcgtggcatctcgaatgcctgaaacgggcaacgccgtcaatgaaatggatgttaaggcatccagacgtctaaatcaatcaggtttatgcgaagagcactttcttgcaggtcgaaacatgcgatactagcgtcacatgccttattaaggagctataaaaggtggcgaagagcgtacccgcaatttttcttgaccgtgatggcaccattaatgtcgatcacggctatgtccatgagatcgacaactttgaatttatcgacggtgttattgacgccatgcgcgagctaaaaaaaatgggctttgcgctggtggtagtaaccaaccagtctggcattgctcgcggtaaatttaccgaagcacagtttgaaacgctgaccgagtggatggactggagcctggcggaccgagatgtcgatctggatggtatctattattgcccgcatcatccgcagggtagtgttgaagagtttcgccaggtctgcgattgccgcaaaccacatccggggatgcttttgagtgcacgcgattatttgcatattgatatggccgcttcttatatggtgggcgataaattagaagatatgcaggcagcggttgcggcgaacgtgggaacaaaagtgctggtgcgtacgggtaaacctattacgcctgaagcagaaaacgcggcggattgggtgttaaatagcctggcagacctgccgcaagcgataaaaaagcagcaaaaaccggcacaatgattaaaagatgagcggttgaaataaaaatgcatttttccgcttgtcttcctgagccgactccctataatgcgcctccatcgacacggcggatgtgaatcacttcacacaaacagccggttcggttgaagagaaaaatcctgaaattcagggttgactctgaaagaggaaagcgtaatatacgccacctcgcgacagtgagctgaaagccgcgtcgcaactgctctttaacaatttatcagacaatctgtgtgggcactcgaagatacggattcttaacgtcgcaagacgaaaaatgaataccaagtctcaagagtgaacacgtaattcattacaaagtttaattctttgagcatcaaacttttaaattgaagagtttgatcatggctcagattgaacgctggcggcaggcctaacacatgcaagtcgaacggtaacaggaagaagcttgcttctttgctgacgagtggcggacgggtgagtaatgtctgggaaactgcctgatggagggggataactactggaaacggtagctaataccgcataacgtcgcaagaccaaagagggggaccttcgggcctcttgccatcggatgtgcccagatgggattagctagtaggtggggtaacggctcacctaggcgacgatccctagctggtctgagaggatgaccagccacactggaactgagacacggtccagactcctacgggaggcagcagtggggaatattgcacaatgggcgcaagcctgatgcagccatgccgcgtgtatgaagaaggccttcgggttgtaaagtactttcagcggggaggaagggagtaaagttaatacctttgctcattgacgttacccgcagaagaagcaccggctaactccgtgccagcagccgcggtaatacggagggtgcaagcgttaatcggaattactgggcgtaaagcgcacgcaggcggtttgttaagtcagatgtgaaatccccgggctcaacctgggaactgcatctgatactggcaagcttgagtctcgtagaggggggtagaattccaggtgtagcggtgaaatgcgtagagatctggaggaataccggtggcgaaggcggccccctggacgaagactgacgctcaggtgcgaaagcgtggggagcaaacaggattagataccctggtagtccacgccgtaaacgatgtcgacttggaggttgtgcccttgaggcgtggcttccggagctaacgcgttaagtcgaccgcctggggagtacggccgcaaggttaaaactcaaatgaattgacgggggcccgcacaagcggtggagcatgtggtttaattcgatgcaacgcgaagaaccttacctggtcttgacatccacagaactttccagagatggattggtgccttcgggaactgtgagacaggtgctgcatggctgtcgtcagctcgtgttgtgaaatgttgggttaagtcccgcaacgagcgcaacccttatcttttgttgccagcggtccggccgggaactcaaaggagactgccagtgataaactggaggaaggtggggatgacgtcaagtcatcatggcccttacgaccagggctacacacgtgctacaatggcgcatacaaagagaagcgacctcgcgagagcaagcggacctcataaagtgcgtcgtagtccggattggagtctgcaactcgactccatgaagtcggaatcgctagtaatcgtggatcagaatgccacggtgaatacgttcccgggccttgtacacaccgcccgtcacaccatgggagtgggttgcaaaagaagtaggtagcttaaccttcgggagggcgcttaccactttgtgattcatgactggggtgaagtcgtaacaaggtaaccgtaggggaacctgcggttggatcacctccttaccttaaagaagcgtactttgcagtgctcacacagattgtctgatgaaaatgagcagtaaaacctctacaggcttgtagctcaggtggttagagcgcacccctgataagggtgaggtcggtggttcaagtccactcaggcctaccaaatttgcacggcaaatttgaagaggttttaactacatgttatggggctatagctcagctgggagagcgcctgctttgcacgcaggaggtctgcggttcgatcccgcatagctccaccatctctgtagtggttaaataaaaaatacttcagagtgtacctgcaaaggttcactgcgaagttttgctctttaaaaatctggatcaagctgaaaattgaaacactgaacaatgaaagttgttcgtgagtctctcaaattttcgcaacacgatgatggatcgcaagaaacatcttcgggttgtgaggttaagcgactaagcgtacacggtggatgccctggcagtcagaggcgatgaaggacgtgctaatctgcgataagcgtcggtaaggtgatatgaaccgttataaccggcgatttccgaatggggaaacccagtgtgtttcgacacactatcattaactgaatccataggttaatgaggcgaaccgggggaactgaaacatctaagtaccccgaggaaaagaaatcaaccgagattcccccagtagcggcgagcgaacggggaggagcccagagcctgaatcagtgtgtgtgttagtggaagcgtctggaaaggcgcgcgatacagggtgacagccccgtacacaaaaatgcacatgctgtgagctcgatgagtagggcgggacacgtggtatcctgtctgaatatggggggggaccatcctccaaggctaaatactcctgactgaccgatagtgaaccagtaccgtgagggaaaggcgaaaagaaccccggcgaggggagtgaaaaagaacctgaaaccgtgtacgtacaagcagtgggagcatgcttaggcgtgtgactgcgtaccttttgtataatgggtcagcgacttatattctgtagcaaggttaaccgaataggggagccgaagggaaaccgagtcttaactgggcgttaagttgcagggtatagacccgaaacccggtgatctagccatgggcaggttgaaggttgggtaacactaactggaggaccgaaccgactaatgttgaaaaattagcggatgacttgtggctgggggtgaaaggccaatcaaaccgggagatagctggttctccccgaaagctatttaggtagcgcctcgtgaactcatctccgggggtagagcactgtttcggcaagggggtcatcccgacttaccaacccgatgcaaactgcgaataccggagaatgttatcacgggagacacacggcgggtgctaacgtccgtcgtgaagagggaaacaacccagaccgccagctaaggtcccaaagtcatggttaagtgggaaacgatgtgggaaggcccagacagccaggatgttggcttagaagcagccatcatttaaagaaagcgtaatagctcactggtcgagtcggcctgcgcggaagatgtaacggggctaaaccatgcaccgaagctgcggcagcgacgcttatgcgttgttgggtaggggagcgttctgtaagcctgtgaaggtgtactgtgaggtatgctggaggtatcagaagtgcgaatgctgacataagtaacgataaagcgggtgaaaagcccgctcgccggaagaccaagggttcctgtccaacgttaatcggggcagggtgagtcgacccctaaggcgaggccgaaaggcgtagtcgatgggaaacaggttaatattcctgtacttggtgttactgcgaaggggggacggagaaggctatgttggccgggcgacggttgtcccggtttaagcgtgtaggctggttttccaggcaaatccggaaaatcaaggctgaggcgtgatgacgaggcactacggtgctgaagcaacaaatgccctgcttccaggaaaagcctctaagcatcaggtaacatcaaatcgtaccccaaaccgacacaggtggtcaggtagagaataccaaggcgcttgagagaactcgggtgaaggaactaggcaaaatggtgccgtaacttcgggagaaggcacgctgatatgtaggtgaagcgacttgctcgtggagctgaaatcagtcgaagataccagctggctgcaactgtttattaaaaacacagcactgtgcaaacacgaaagtggacgtatacggtgtgacgcctgcccggtgccggaaggttaattgatggggttagcgcaagcgaagctcttgatcgaagccccggtaaacggcggccgtaactataacggtcctaaggtagcgaaattccttgtcgggtaagttccgacctgcacgaatggcgtaatgatggccaggctgtctccacccgagactcagtgaaattgaactcgctgtgaagatgcagtgtacccgcggcaagacggaaagaccccgtgaacctttactatagcttgacactgaacattgagccttgatgtgtaggataggtgggaggctttgaagtgtggacgccagtctgcatggagccgaccttgaaataccaccctttaatgtttgatgttctaacgttgacccgtaatccgggttgcggacagtgtctggtgggtagtttgactggggcggtctcctcctaaagagtaacggaggagcacgaaggttggctaatcctggtcggacatcaggaggttagtgcaatggcataagccagcttgactgcgagcgtgacggcgcgagcaggtgcgaaagcaggtcatagtgatccggtggttctgaatggaagggccatcgctcaacggataaaaggtactccggggataacaggctgataccgcccaagagttcatatcgacggcggtgtttggcacctcgatgtcggctcatcacatcctggggctgaagtaggtcccaagggtatggctgttcgccatttaaagtggtacgcgagctgggtttagaacgtcgtgagacagttcggtccctatctgccgtgggcgctggagaactgaggggggctgctcctagtacgagaggaccggagtggacgcatcactggtgttcgggttgtcatgccaatggcactgcccggtagctaaatgcggaagagataagtgctgaaagcatctaagcacgaaacttgccccgagatgagttctccctgactccttgagagtcctgaaggaacgttgaagacgacgacgttgataggccgggtgtgtaagcgcagcgatgcgttgagctaaccggtactaatgaaccgtgaggcttaaccttacaacgccgaagctgttttggcggattgagagaagattttcagcctgatacagattaaatcagaacgcagaagcggtctgataaaacagaatttgcctggcggccgtagcgcggtggtcccacctgaccccatgccgaactcagaagtgaaacgccgtagcgccgatggtagtgtggggtctccccatgcgagagtagggaactgccaggcatcaaattaagcagtaagccggtcataaaaccggtggttgtaaaagaattcggtggagcggtagttcagtcggttagaatacctgcctgtcacgcagggggtcgcgggttcgagtcccgtccgttccgccacttattaagaagcctcgagttaacgctcgaggttttttttcgtctgtatatctattattgccagaatcgcaaaaatcctctgcattttacgctctttttcctcaacagtctgaagcccataatcacctcagttaacgaaaatagcattaaaagaggcatattatggctatccctgcatttggtttaggtactttccgtctgaaagacgacgttgttattagttctgtgataacggcgcttgaacttggttatcgcgcaattgataccgcacaaatctatgataacgaagccgcagtaggtcaggcgattgcagaaagtggcgtgccacgtcatgaactctacatcaccactaaaatctggattgaaaatctcagcaaagacaaattgatcccaagtctgaaagagagcctgcaaaaattgcgtaccgattatgttgatctgacgctaatccactggccgagtccagacgatgaagtctctgttgaagagtttatgcaggcgctgctggaagccaaaaaacaagggctgacgcgtgagatcggtatttccaacttcacgatcccgttgatggaaaaagcgattgctgctgttggtgctgaaaacatcgctactaaccagattgaactctctccttatctgcaaaaccgtaaagtggttgcctgggctaaacagcacggcatccatattacttcctatatgacgctggcgtatggtaaggccctgaaagatgaggttattgctcgtatcgcagctaaacacaatgcgactccggcacaagtgattctggcgtgggctatgggggaaggttacagtgtaattccttcttctactaaacgtaaaaacctggaaagtaatcttaaggcacaaaatttacagcttgatgccgaagataaaaaagcgatcgccgcactggattgcaacgaccgcctggttagcccggaaggtctggctcctgaatgggattaagcctctctgacagctcctccgggagctgtttttacatgctcgctaaggaaatcgataaaagcccggatgcgcgtacttaccgcacggtcgctgtaatagacggcactgaatggcatttccactggcaacactttatctgccattaactccaccaattctccgcgagcgatttctttgtcgatcatgtagtcggacaaacacgcaatcccgttgccactcaggcaaagctgtttcagtgtttccccactattggaactcaaaccgtacttcacctcatgtaattgtccatcgctacgggctatcggccaggtattgagggaagcgggttcagtgaatcccaggcaaatatgttgctttaaatcgtcgatcgtttctggcttcccgtagcgggaaatataatcgggggaggcgataatttttcgataactgttaaataacggcctggcacgtaagctggaatccgttaacgtaccagcgcgtatcgcgacatccacttttctttcgatcaaattaataatcgtttcggaggagactaggctcaaagtgacttccggatagcgttcacggaaaggcttaattaacggcatcagaaagtgcagcaccactggagttgcggcatcgatccgtaacagtccacgcggtgtattacgcgtctccataatttcactttctgccgctgccatctcctgcaaaatactctgtacgcgacgaaaataacgctcgccttcttccgtcaggctaagttgtcgcgtggtccgattaagcaggctaacgccaagtttcatctccagctttttcaccgcccggcttaccgcactgtttgcttgccctaattgttccgctgcccggctaaagctgccgctttcgacgacgctaacaaaaatggcgagttcttcgctcgtggctttcatttttgctcctgttgcaaaatagaagagatattttgaatttatttgtcattaaaccatcaggatgcgtgatatgtcatgcgatttaatgttctccataatgagcaaaattctgaccggtgtaagcacttgcttacataacaatatacaattgctcgttgaaagagtgagctaaaatccctataacagtagaaccctcccgagtgcggaagggttgacgtaatagaggtttcaaagtcaaaagtgcgaaaaaacacctatgccatgcgctatgttgccggacaacctgcggaaaggatcttaccgccggggtcttttgcgagcatcggccaggcattaccacctggggaaccgttaagtaccgaagagcgtattcggatcctggtgtggaacatatacaaacagcaacgcgctgaatggttgagcgtattaaagaactacggcaaagatgcacatctggtgttattgcaggaagcgcagacaacgccagagttagtacagtttgcgaccgctaactatcttgccgccgatcaggtacccgctttcgtgctgccacaacatccttctggcgtaatgacccttagcgcggcacatccagtgtattgctgcccgttacgtgaacgagaacccattttgcgtctggcgaagagcgcactggtgacggtctatccattacctgacacccgcctgttgatggtggttaatatacacgccgtcaacttcagtctgggcgtggatgtctatagtaagcagttacttcctattggcgatcagatagctcaccacagcggcccggtcattatggcgggagatttcaatgcctggagccgtagaaggatgaacgcgttatatcgctttgcgcgggaaatgagcctgcgccaggtgcgttttaccgatgatcagcgccgtcgggcgtttggtcgcccgctcgattttgttttctaccgtggtctgaacgtcagtgaagcttctgtactggttacgcgcgcttccgatcacaatccgctactcgttgaattcagtcccggcaagcctgataaataaggtatgagtggtctgccacagggcagaccaacgtttggcgctgcgcaaaacgtgagcgcggtggtggcgtatgacttatctgcccacatgctggatgtcgtggcacaagctgccgaagcccggcaactgaaaaatatcaccacccgccagggatatgccgaaagtctgccatttgccgataacgcatttgatattgttatcagccgttattctgcccatcactggcatgatgttggtgcagcactgcgagaagtgaataggatattgaaacctggcggtaggctgattgtgatggacgtaatgtctccgggtcacccagtgcgcgacatctggttacagacggtagaagcattacgcgatacctctcacgtacgaaactacgccagcggtgagtggttgacgttaatcaatgaagccaatctgatagttgataatttaattacagataagttaccgctggaattttctagttgggtcgcgagaatgcgtacgccagaagcgttagtagacgctattcgcatttaccaacagagcgcaagcacagaggtgagaacgtattttgccttgcagaatgatggctttttcaccagtgatatcatcatggtagatgcacataaagcggcataaataaaaaaggcaccgggggaatcggtgcctttttattatctggtttgtcaggaatctggcatgttgttgtttttcacaaacaacgtcagcttatcgcctggttgcagattcgcagtgtcgctgttccagcgcatcacatctttgatgttcacgccgtggcgtttagcaatgctactaaggctatcgcctttgcgcacacgatacgtaatgctatcgctgttgtttgccagtcgctgtgcgctactgcctgcaccaatcgtcaaactttggcctggcttcagcttagatccgcgcagtttgttccactgctgcaaatctttggtgcttacgccgagacgactagcgatactactaagcgtgtcgccagagcgtacggtgtaaacacggctgttaagcggcgtattgtcggcaaccagcgtgctctgtacagcagcaatttcgccactagccagagattcacgcagttgatctgcatgcttctttggcaccatcacgtactgcgggccacttgcgcccagcgtggagccttttacgccagcgttgaatgtcttcagcttgctgacggaaatccccgccatatctgctaccttcgccatttcaaccgggctgctcaggtgcacacgcgccagagcacggctttcatcggtcgttggcagacgtacgccataacgcttgctgtttttgagaatatcactcaatgccagcattttaggcacgtactgcttcgtttcctgcggcaacggtaagctccagaagtccgtggatttcccacgcgctttgttcgttttaattgccttcatgacccgaccttcgccgctgttataagccgctacggtcagaagccagtcgccgtcaaacattttgttcagacgctgcatcatattcagcgcggcagttgcactagcaacaacatcgcgacgcgcgtcataattgcgggtctgtttcaaaccataattgcgccccgtgctcggaatgatctgccagatgcctgcggcattggcgccagacgttgcgtgaggatcaaaagcgctctccactatgggtagtagtaccagttccataggcatgttacgttttttaacttgccctgctatccagtacatatacggctctgcccgtaaagttacatcgtggagatagctcttattgcgtaaatatttctgtttctgttcgcgaatccggtcattttccggaattcccatctttagctcgtcgccaatgaaagcccacaagtcaccatctggcgcgatagacgtcccatcgtccatccatcgtgcctgacttgtaaactttgctgcttccccttgaccagctgcagaaaggctctgtgcgtgctgttgaacgttgccggtactctggcaacccacgagcaggacagaggcgagtaatatcgcttttgccttcatgtgtgtgtcaatagttgcttaaaagacgaccgatcataacggcgaacggagccgatgacaagaaagttttatcagaacctatctttcttactccttaaccatgcaaaacgctcttcaggttgttgcaataatgtttcttcattaattacattaattaaatcaatatcttccgttcttaaaaaaacattaatttgccgctcatttttcagaattacgggtagtgttatttgattttttgcccgtaactccttaactttacgataataatcatttatggacaaatcgtgcggaagaatactcaaagcaaacttcatattacttaaggtatattcatgagcacaacataccaatgtatcgtcaggtaacgcacttaactttttaagactttgatacatttgacttgctgtcccttcaaacaaccgaccacacccaccagaaaacagtgtgtcgccgcaaaatagataaggtttactgaagtaacagatatgtcctaaagtgtgacccggcgtagcaattacactaaattcatgccccaaaacgaaggcagtttcgccatctttgactacctgtgttgttcccttatcttgtgtctcttgtggaccatacaccacaatttgtggaaacttttccaccagttcttttacgccgccaacgtgatcgtggtgatggtgggtgagaaatatggcctccggttgccagttattggcggcaatggcgtttaatactggctctgcgtctccgggatcgacaatcaggcagcgacctgcttcatcattcaaaacccagatgtaattgtcatcaaaggcgggaatactgttaagattcatagattacctctcagtgtgaaacggaaggttgtgatgaaaccggcaagagtccctcaaactgtcgtggctcctgattgctggggcgatttgccctggggaaagctttatcgcaaggcgctggagcgccagctcaacccgtggttcactaaaatgtatggttttcatctgcttaagattggcaatttaagcgcagaaatcaattgcgaagcgtgcgcggtttctcatcaagtgaatgtttctgcgcaaggaatgcccgtccaggtacaggcggacccacttcatcttccttttgccgataaatccgttgatgtttgtctactggcacatacattgccgtggtgcaccgatccgcatcgtttattgcgtgaagccgatcgggtattgattgatgatggctggctggtcattagtggcttcaatcccatcagttttatgggattacgcaaacttgtgccggtattgcgcaaaaccagcccctataacagccggatgtttactctgatgcggcagctggactggctctctttgttgaattttgaagtgctacacgccagccgtttccacgttctcccgtggaacaaacacggaggaaaactattgaatgcgcatattcctgcgcttggttgcttacaacttattgttgcccggaaacggactattcctttaacgctaaatccgatgaaacagagtaaaaacaagccacgaattcgccaggcggttggagccacccggcaatgtcgtaaaccacaggcttaaacttcaacttggtagcctgtatcttccagtgtgggattcatcgccgcggcacgagccagttcatcacagcgttcgttttccgggtgtccggcatggcctttaacccattcccatttgatttgatgctgccccaatgcagcatcaagacgttgccagagatcgacattttttactggttttttgtctgcggttttccagccacgttttttccagttatggatccactgggtgataccctggcggacatactggctgtcggtactcaaaatgacttcgcaatgttcttttaacgcctccagcgcgacaatagcggccatcaactccatacggttgttggtggtgcgggtgtagccagcgctaaaggttttctcgcgtccgcgatagcgtaaaatagcgccgtaacccccaggtcctggattgcccagacagctaccatcggtgaaaatttctacctgtttaagcatctctggtagacttcctgtaattgaatcgaactgtaaaacgacaagtctgacataaatgaccgctatgagcactgcaattacacgccagatcgttctcgataccgaaaccaccggtatgaaccagattggtgcgcactatgaaggccacaagatcattgagattggtgccgttgaagtggtgaaccgtcgcctgacgggcaataacttccatgtttatctcaaacccgatcggctggtggatccggaagcctttggcgtacatggtattgccgatgaatttttgctcgataagcccacgtttgccgaagtagccgatgagttcatggactatattcgcggcgcggagttggtgatccataacgcagcgttcgatatcggctttatggactacgagtttagcttgcttaagcgcgatattccgaagaccaatactttctgtaaggtcaccgatagccttgcggtggcgaggaaaatgtttcccggtaagcgcaacagcctcgatgcgttatgtgctcgctacgaaatagataacagtaaacgaacgctgcacggggcattactcgatgcccagatccttgcggaagtttatctggcgatgaccggtggtcaaacgagcatggcttttgcgatggaaggagagacacaacagcaacaaggtgaagcaacaattcagcgcattgtacgtcaggcaagtaagttacgcgttgtttttgcgacagatgaagagattgcagctcatgaagcccgtctcgatctggtgcagaagaaaggcggaagttgcctctggcgagcataaatacctgtgaaaggcgctaaaaatagcgacttgggcgatttttgcagcaaacgattcaaaagatgagaaaaaccgttgacgaaggtcgaggcaatccgtaatattcgcctcgttcccaacggaacacaacgcggagcggtagttcagtcggttagaatacctgcctgtcacgcagggggtcgcgggttcgagtcccgtccgttccgccactattcactcatgaaaatgagttcagagagccgcaagatttttaattttgcggtttttttgtatttgaattccaccatttctctgttcaatgattttactctggcgtaggtgcgtgattctcgcttgttgtctcattcattaaaattcaataatgatatcgaaccattcagcttaaatatatttctagagaataaatttatattgattaaatgaatgtatatttcaaattgattttgtttgttattatttaagtgaggtatataattagagtccgttatcaatgctaaatattctaatcattatgacaggcgagggagtgtccaattatgaatagtaaaaagctttgttgcatatgtgtgttattcagcctgcttgcaggatgtgcctctgaatcttctattgatgaaaagaagaaaaaagctcaagtcacacaaagtaatattaataaaaacactccccagcaactgacagacaaagatttattcggtaatgaaaccactctggccgtatccgaagaggatattcaagctgcgcttgatggagatgagttccgcgttccccttaattctcctgtaatacttgttcaatccggcaaccgcgcaccggaaaccattatgcaggaggagatgcgaaaatattatactgtttccacattctctggtatcccggacaggcaaaagcctctgacttgtaacaaaaacaaagataaaaatgagaacgaggatgttgccagtgctgagaatatgaactggatgcaggcactgcgttttgtggctgcaaaaggacatcagaaagcgattattgtttaccaggatatgttgcagacaggaaaatatgactctgcgctgaaaagtacagtatggtccgactataaaaatgacaaactcactgacgctatctccctgcgctacctggtacgtttcacgctggtggatgtggcaacaggtgagtgggctacctggagcccggtgaattatgaatataaagtgcttccaccattgcccgacaagaatgaagccagtacgactgatatgacagagcagcaaatcatgcaacttaagcaaaagacctataaagcgatggtaaaagatttggttaaccgctatcaataataaattatatctgccgccaggaatttctggcggcaataatacaaaattctttgcataagaaatttttcttgacaaagacagtgcaagaaaggacatggaatccggagttaaaaactgtttgttttagaatatttaattatttaactgctgaatcttccttgcgagaaatatatccattattacatttcatgccatttttaatatagattgctcctgggaaaattcccgtattattaccgcaggggtgataattagtattgacatatcctgtgacaaaaggagctattaaaggtgctattacgatagctattagtaaaaatataagagttagctgtattgttatgtctgtggcgaaattgactaccttcgtttttttgattaagaatgattttattatcgtaagtaaaattacatgaatatttaaaaaggaaaacgacatgaaaccgaagcacagaatcaacattctccaatcataaaatatttccgtggagcattttattattgaatatagaggtttaactccggtaaaaaacaaagaagcattgaatgcagggaaaaataatatggccataaaaaacatcgaaagaaactcttttaatttaacatgtaaacgcatggttaatcctcatatcacgggtggagtgttaagaacatacataaatggagtcatgttttcccttttccatttatcaagttcctgttgccgttttagtccatctctaattgcatattttaatttttcacttaaatggcattgagcatcgatttcatttaaaacaactgtacacactatccctgtcagtaaaattgctcctccgacaagaattactggaaagccaaagctaacacaggcaaaagaagccagacttccaatagcggttgcaacaccaccggctataactgctttggccacatccatactaaaatcgccaagaaaattaaccagatctcgctcactactcataataaattctatggttctgctgatttaaccgcagagaagttcgccacagcaatccgaaaccactggcacgtggagaataagctgcacaggcgtctggacgtggtaatgaatgaagacgactacaaaataagaagaggaaacgcagcagaattatttagtgggatacggcacattgctattaatattttgacgaatgagaaggtattcaaggcagggttaagacgtaagatgcgaaaagcagccatggacagaaactacctggcgagtgtccttgcggggagcgggcttagctaataataccccgactctccccgtccttaaacacaacccccactcaccacaacctaaactcatccgcatcctgccatgccggaaacttttctctatattcccgcaatgctgccatgctcagctccgcatcaatgcgcgttgcctgatgcgcgtcggcagtagcgataatctctccttgcggattaatcacccggctgtcaccgcgataatggcagccgttgccatcgctgccgacgcgattgcatcccgccacatacgcctgattctcaatcgcgcgggccgtcagcaatgcctgccagtgcagagagcgcggagcaggccagttggcgacgtacagggcgaggtcataatcgttgagattgcggctccacacaggaaaacgtaagtcgtagcacaccagcggcaaaatacgccagccgcgccattccacaatcactcgcgcattgcccgctttataatgtagatgctcatctgccatgcggaacagatgacgcttatcataaaaatgtaccgtgccgcccggctcaaccagcaaaaagcggttaacgctaccagactccgtttgtaatgcaacactgcctgcaatcagcgcattgcactgctgcgccttagctgtcatccagttcactacgtcatcttgtgctaggctgctagctgccgcttccatggcaaagccgctggtaaacatctccggtagaacgatcacatcgcgcccggtaataccttccagttgacgatcaaaatgacgcaggttggcaggaccatccatccacaccagtggttgctgcaaaagcgtaatcttcaaaccaggcacggtgtacaactcctttatgcgaagggttttataactttaacaccttatcaggcagttgccttagcgcagaataaattgataacaaatgctgatattggaaatatctgatttgcaaattatcgtgttatcgccaggctttaggaggttaataacatgggcaggataagcagcggaggaatgatgtttaaggcaataacgacagtcgccgctctggtcatcgccaccagtgcaatggcgcaggatgatttaaccattagcagccttgcaaagggcgaaaccaccaaagctgcatttaatcagatggtacaagggcataagctgcctgcctgggtgatgaaaggcggtacttatactcccgcacaaaccgtaacgttgggagatgagacgtatcaggtgatgagcgcgtgcaaaccgcatgactgtggcagccaacgtatcgctgtgatgtggtccgagaaatctaatcagatgacggggctgttcagcactattgatgagaaaacgagccaagagaaactcacctggctgaatgtgaacgatgcgcttagcattgatggtaaaacggtgttgttcgcggcgttgaccggcagcctggaaaaccatccggatggctttaattttaaataattagcggataaagaaacggagcctttcggctccgttattcatttacgcggcttcaactttccgcactttctccggcaactttaccggcttcgtcgccagctcttccggatcaaagtcatcaacgttaatactgcgcagacggctttcttcagctttcaccagaatagcggcttcatctttatcaatcagccccttcaccagcgcgttgtgcgccagttcatccagacgggtaaacggcaggtttttacccagctctttacagatccgctgatgaattgggtcggcggcaatcacatccaccagcgcctcttccagcaagccaaccggattatgctcgctcggcgtcaggtactgaccgcgaccaatgcgggaacgggtggcgttcggcacttgtaaaatcttcgccactttatgatccagcttgtcagaaggtgccagataatgacgtccggtcgggaagatcaccacattcagcagcccggcaaccacgcggttcgggaagttttgcagtaaatcatccatcgcctgttcagcctgatacagcgcatcttgtacgccccagtgcaccagcggcaggtcggcttcattacggccttcgtcgtcataacgcttcagcacggcagaggcgaggtagagctggcttaaaatatcccccagacgggcgctgatgcgctcgcgacgtttcaggctgccgcccagcactgccatgctgacatcagaaagcagggcgaggttggcgctcaggcggttcaggtgctgatagtagcgtttagtggcatcgccggttggcgtgctgctggttaaaccgcgcgtcaggcccagccagaagctgcgaactttgttgctaccgacgtgaccgatatgtttgaacaacagtttatcgaacgcgttgacgtcattgttcttcgccgcttccatctcttccagcacgtacggatggcaacgaatcgctccttgtccgaagatcatcatgctgcgggtcagaatgttagccccttcaacggtgatggcaatcggtgcgccctggtaagcacgcgccaggaagttgctttgcccgagcataatgcctttaccgccggtaatatccatcgcatcaataatgttctgctgcccgcggtgggtacagtgatacttaacgatagcgctcagcacggcaggtttttcgccgagcataatgccgtaggtaatcaggcttgccgcagcatccatcacgtaggcattaccggcaatacgcgccagcggctcttcaatcccttccatcttaccaatagagattttgaactgacggcgaatgtgagcatacgcgccggttgccagcgctacgcttttcacgccgccggtactgttggaaggcagggtgatgccgcggcctacgctgaggcactccaccagcatccgccagccttgcccggccattttcggcccgccgatgatgtaatcgatcggcacgaagacatctttaccgcgcgtcggtccgttctggaacggtacgttcagcgggaagtggcgacgaccaatttccacgcccggcgtggtggttgggatcagcgcacaggtaatgcctaaatcttctgcaccgccgagtaatttttccgggtcggagagtttaaacgccagcccaagcacggtcgcaatcggtgccagcgtaatgtagcgtttgttccaggtcagacgcatccccagcacctgctggccctgccattcgcccatgcagacaatcccggtgtccggaatcgcgcccgcatcggaacccgcttccgggctggtcagtgcaaagcaggggatctcctgaccacgcgccagacgcggcagatagtgatctttctgctcgtcagtgccgtaatgttgcaacagttcgcccgggcctaaactgtttggcacgccgacggtaatcgccaggatcccgctcacgccggagagtttttgcagcacgcgagactgggcataagcgctgaactccagcccgccgtactcttttttgatgatcatcgcgaagaaacgatgctctttaaggtacgcccacaactccggcggcagatccgccagctcatgggtgatctggaaatcattcgccatccggcaggcttcttctaccgggccgtcgagaaacgcttgctcttcggcggtcaggcgcggctgcggatagttatgcagctttttccagtccggcttgccctggaacaagtcgccctcccaccaggtggtgcccgcatcaatcgcttctttctcagtgcggctcatcggcggcatcaccttacggaaaccgcgaaataccggcgcggaaatcatgctcttacgcataggcgcaaagttaaatggcacgaggataatggccagaggcaccagtacccacgcgctccacagaccagcaacgccgagggcggctgtccaggcgagcaaaatcagactgctgataaataagctcacgcggtgatagaacaacgcgccgagcaggacaaccgtagcgagaatactcaaaatcatcataacgaaaagccccttacttgtaggaggtctgaccacttgtgatgatatggttgtagtggatgtaaaaacatttagcaatatgtttacaatataattacaacaaagctcacattgttgctgtttttatccgcacttcaggtcaaaaagtcctggtcatagcacctgcccgtacttctcgcttttggcggtatccggtacactgcattttgtctattacatttatgctgaaggatatcctcatgtaccaggatcttattcgtaacgaactgaacgaagcggcggaaacgctggctaactttttaaaagatgacgccaatattcacgccattcagcgcgcggcggtcctgttagcagacagctttaaagccggtggcaaagtgctttcctgcggcaacggcggttcccattgcgacgctatgcactttgccgaagagttgaccggtcgctaccgtgaaaaccgtccgggctacccggcgattgctatttctgacgttagtcatatttcctgcgtcggtaatgatttcggtttcaatgatattttctcccgctacgttgaagcggtaggtcgcgaaggcgatgtactgctggggatctccacctccggtaactctgcaaacgtgatcaaagcgatcgcagcggcgcgtgagaagggaatgaaagtgatcaccctgaccggtaaagacggcggcaaaatggctggcacggcggatatcgaaattcgcgtaccgcactttggttatgccgaccgcattcaggagattcacattaaagtgatccatatcctgatccagttgattgaaaaagagatggttaagtaagtctggcgtaggccggataagacgtttacgccgcatccggcatttgtgcgctgatgcctgatgcgacgctgacgcgtcttatcatgcctacaaatctgtacgcgaaccgtaggccgaataatgcgttcacgccgcatccgacctgaaaattcttaaatcaatcttcgccgggggccatgcgctcccgctgttgtggaggttacccatgtgcgaattgctcgggatgagcgccaacgtccctaccgatatctgctttagtttcaccgggcttgtacagcgtggtggtggaaccgggccacataaagatggctggggcattaccttttacgaaggtaaaggctgtcgcacatttaaagatccacaacccagctttaattcccccatcgccaaacttgtccaggactacccgataaaatcctgtagcgtggtggctcatattcgccaggctaatcggggcgaggtggcgctggaaaatactcacccatttacccgcgagttatgggggcgtaactggacttatgcccataacggacaactgacgggctacaaaagtctggaaaccggcaacttccgcccggtaggcgaaaccgacagcgaaaaagccttctgctggctcctgcataaattaacgcagcgttacccgcgcacaccgggcaacatggcggcggtatttaaatatatcgccagtctggcggatgaactgcggcagaagggcgttttcaacatgctgcttagcgacgggcgctatgtaatggcgtattgcagcactaatttacactggatcacccgccgcgcgccgtttggcgtggcaacgttgctggatcaggatgtggaaatcgacttcagcagccagaccacaccgaatgatgtggtcacggtgattgcaacacagccgctgacgggcaatgaaacctggcaaaagattatgccaggcgaatggcgcttattttgcctcggggagcgtgtagtttgattattttgcctcggggagcgtgtagttacttgccagttgtggctgcacaacttcgtggcttaacggcttgctgaccacgtaacgaccattgaccacagaaacggttggtggcttacgggtttgctcaaagtagtcgtaacccggcttcagttgctcccagaagtccttaaagttggaatatttatggcgcttcatattggcgtcggtcatgcggaacgggtaaatactcacttgcacgctcggctgaccaaacaccagcgcaccagtaacgaactggaatatctcatcaataccctgattggtcattgcgtagcagccgatggaaacacaatcgccgtggatcatcaggtatttcccttcataaccatgcgcacggtcataggcattggggaaaccaatattaatcgctttgtagtaacggctgtctggttttaactgattacgctggacgctataaaacccttccgggcttttgaaatcgccctgacgctgttttggccctaagccgccggaatatttacagattttatagctgtcgagcagttgatattgctcgcccattttgacgtagagatcgagcgtacgttcttccttgaagatctggatgtagacaggggatcccatcaactgctgcttatactctttgctcacaggcgtggtagagctactgctgcccagcaaaccggcaaaactaacgcacgggatcaacaacatcgcaagaattaatgcgattttacgcatactgcttattccttgataaaacggttacacacgccaggacggcaaaatggatcccaaatcggaatagtctggatttggaaggctcacattatcaccaaaagagttttacgcaagcctgtcggcgcagggtttacaaatttcatcggaagcgggctttacccaaagagcgccgcgtgagttccagttctctcaaatcgtaaaagtttatcggtaagtttgtaaatcaggatccagtccggttcgacatgagcatcgcgataacctttccaactaccttgcagcgggtggtctttataaacagctggaagcggtaaagtattattgataagaagcgtcataagatatttcaatttattcatatccttatgacgcttttgtgcaagttttacatccttactatattgtccgctgtattcaatatccctttgaatcatatttaaattcctaatttatcaaataaatcatcggcgtctttggccttatgaacatcaatgccagcttcgctgtttttgatactttgaatggttaattgattaggctcgcgtaaatcaaacggcaatgccttttcacgcgcgacctttgtgagggttatgcgaaccaggtcagagatggtcagccccatcccggccagtacgtccgctgcctgattcttcagatcttcatcgattcgggcgcgaacaaacgcgttagcagccattggggtatctcctgtgctgtatatttattcagcttgaattgtagctcaaatgagcaacagcgacaatccatgagtaatttaataaacggatgtttttacataattaactgaaatatatatgttaattttataataatggtttattaagtttgttcagaaacgatccgggatacactgcaacattaaagcatgaccagccattattgagtatgtccttgccgagcattccatcctttgtattgagcggattactgttgatttgtttgccgttttctagttttgccagcgccaccacaagtcatatctctttcagctacgccgcccgccagcggatgcaaaaccgtgcgcgtttattaaaacagtaccaaactcatctgaaaaagcaggccagctatattgtggaaggcaatgccgaaagcaaaagggcgctacgccagcacaaccgggagcagataaaacagcatccagaatggtttcctgctccgctcaaggcgagtgacagacgctggcaggcgctggcggaaaacaaccactttttaagcagcgaccatctgcataacattaccgaagtggcgattcaccgcctggagcagcagcttggcaagccttacgtctggggcggtacgcggcctgataaaggctttgactgtagcgggttggttttttatgcctacaacaagatccttgaggctaagctcccgcgcacggccaatgagatgtaccactatcgccgggcaacgattgtggcgaacaacgacctgcgccggggagatttgctgtttttccatatccacagccgcgagatagccgatcatatgggcgtgtatttgggcgatgggcaatttatcgagagcccacgtaccggcgaaaccattcggataagccgattagccgaacctttctggcaggaccattttttgggcgcgcgcaggattttgacggaagagacgattttgtaagacggataaggcgtttacgccgcatccggcagttgtacgcaggtgcctgatgcgacgctggcgcgtcttatcatgcctacgagcccgcgaatatttgcgagccgctttcccgatataaaacaacctcattgccaacctttccttttcttcttaccgttgagaaaaaggagtcgccatgtctgaatatcgtcgttattacatcaaggggggaacatggtttttcacggtgaatttacgaaatcgtcgaagccaacttttgaccacccagtaccagatgctccgtcacgccattattaaagttaagcgagacaggccttttgaaatcaacgcctgggtcgttttgccagagcatatgcactgtatctggacattacctgaaggcgatgatgatttttccagccgctggcgggaaattaaaaagcaatttacccatgcttgtggattgaaaaatatctggcaaccacgtttttgggagcacgccatccgcaataccaaagattataggcatcatgttgattatatttatataaatccagtaaagcatggttgggtaaagcaagtgagtgattggccattcagtacgttccatcgcgatgtcgcgcgagggttatatcccatcgattgggcgggggacgtaacggattttagtgccggggagcgtatcattagttaattgtgcgcagatgcctgatgcgacgctagcgcgtcttatcatgcctacaaacttgtgccggatcggtaggccggataaggcgtttatgccgcatccggcagttatgcgcagatgcctgatgcgacgctggcgcgtcttatcatgcctacaaacttgtgcctgaacggtaggacggataaggcgttcacgccgcatccggcagttgtgcaccaatgctggatacttacatcaacgcccccataatcttcaactccagctcatccggcacttcgttatacgacagcacatgcagccccggcgcaaacaaccttgcataacgcgccagcaaagggcgcagctgcggtggcaccagcagcaccgggtctttccccgccgctttcatctgctctttcacctgtggcatcgtactctggaactggttgagcatattcggatcgaccggcacgctgtcgagcatcactttcccgccctgttgcgcctgattcaccacgttggtcagcagattttccagctcattattcagcgtatacaccgtcagctcctgcttgcgaacgaacggatgggtaatgctgcgccgcaatgccaggcgcacatcggccgccagcagaatatgatctttcgtcaccgtgctactggcgaccagcacggtggcgatggtgacgatatcgcgcagggaaacgccttcggtcagcagcgcccggtacactttcagcaactggctgtaattgagcgccgcgctcaaatcttccgccagacgcggtgccgtcgacgataaacggttatgcaactgcgtaatatcatcatagttaaacaaatcaggaatatagctgcgcacaatcttatttacatgggtagcgatcacgctggcgctgtcgatcacctgataccccatattcagcgccttcgctttctgcgccgcctggatccaggtgaccggcatcccgtacgccgggtcgttcccctgcacgccgtcaatctcgccgtaggtttcgctggagggcagggccatcagtttatccgccggaatatccgcttcatcagcctttatgccgttgatgaaaatggcgtactgactgggcttaaggcggaagttttcccgaatgcggatctccggcagcagcacgccgttgccgtcagaaatcacctgccgcacgccgcgaatccgctgggtgagcgggttaccctgtgctttgtccaccagcgccaccagtttgtaaccgaggcttaaactgataggctcgatcagcggaatggtttcccaactgacctgctgctcgctggtttcggtgatggtgcgggtcagcgtttcgaggcttttctcttccgcctccgccgccagcggctgtttgctcatccgccagccggtaaaaccaagcagggcgctgaacagcaaaaacggcaggtgcggcattcccggtaccaccgccagcacgaacataatcccggtggcggtgtagagcaccgacgggcttgccagcagctggttacgcacgtcatgggcgatatcgccgttgtcgctgacgcgggtgacgataatcgccgccgcggtggagagcagcagggaagggatctgcgccaccaggccgtcgccgatggtcatcagcacatactgctggaaggcagcatcggcgctcaggttgtatttgaagatcccgatacagacgccgccgatcaggttgatcgccagaatcatcatcccggcgatggcgtccccgcgcacaaacttcgatgccccgtccatcgcgccgtagaaatcggcctcgctggcaacatctttacgccgggtttgcgcctgcgcctggttgatcaatccggcgttaagatcggcgtcaatcgccatctgtttgccgggcatcgcgtctaaggtaaagcgggcagaaacctcggaaatacgctcggcccctttggtgacgacaataaagttgattgtcaacagcgtcagtaaatccgagcgtgaaagcattatcgccgcgctgcacgggcagtcgatttttaacggtggtgggctgtcgccgttaaataaaatcagcccgtctcatccgccaaaacctgccaccgtggcggtgccggaagagacggagaaaaaagcgcgtgatgtgaatgagaaaacggcgctgctgaagaagaaatccgccaccgagcttggtgagctggcaaccagtatcaacaccattgcccgtgatgcgcatatggaagcgaatctggagatggagattgttccccagggattacgcgtgctgattaaagacgaccagaaccgcgatatgtttgaacgcggcagcgcgaagattatgccgttctttaaaacgctgctggtggagctcgcgccagtgttcgactcgctcgataataaaattattattaccgggcataccgatgcgatggcctacaaaaacaatatctacaacaactggaacctttcgggtgaccgcgcgctttcggctcgtcgggtgctggaagaggccggaatgccggaagataaagtgatgcaggtaagcgcaatggcggaccagatgctgctggattccaaaaatccgcaaagcgcgggcaaccggcgcattgagattatggtgctgaccaaaagtgcgtccgatacgctgtatcaatactttggtcagcatggggataaagtggtgcagccgctggtgcaaaagctggataagcagcaggtgctttcgcagcgaacgcgttaaatgctgaatctttacgcatttctcaaaccctgaaatcactgtatactttaccagtgttgagaggtgagcaatgcgtaaaatcattcatgtggatatggactgctttttcgccgcagtggagatgcgcgacaatcccgccctgcgcgatatccctattgctattggcggcagccgcgaacgtcgggggggtgatcagcaccgccaattatcccgcgcgtaaatttggcgtacgtagcgctatgccgacagggatggcgctcaaattatgcccacatctcaccttgcttccggggcgctttgacgcctacaaagaagccagtaatcatatccgtgaaatcttcagccgctacaccagccgcattgaaccgttgagtctggatgaggcttatctcgatgtcaccgatagcgtccattgccacggttctgcgaccctcatcgcccaggaaatccgccagacaatcttcaacgagctgcaactgacggcgtctgcgggcgtggcaccagtaaagtttctcgccaaaatcgcctccgacatgaataaacccaacggccagtttgtgattacgccggcagaagttccggcatttttacaaaccttaccgctggcaaaaatccccggcgtcggcaaagtcagtgcggcaaaactggaagcgatggggctgcggacctgcggtgatgtacaaaagtgtgatctggtgatgctgcttaaacgctttggcaaatttggccgcattttgtgggagcgtagtcaggggattgacgaacgcgatgttaacagcgaacggttgcgaaaatccgtcggcgtggaacgcacgatggcggaagatattcatcactggtctgaatgtgaagcgattatcgagcggctgtatccggaacttgaacgccgtctggcaaaggtaaaacctgatttactgattgctcgccagggggtgaaattaaagttcgacgattttcagcaaaccacccaggagcacgtctggccgcggctgaataaagctgatctaatcgccaccgcgcgtaaaacctgggatgaacgccgcggcgggcgcggtgtgcgtctggtggggctgcatgtgacgttgcttgacccgcaaatggaaagacaactggtgctgggattatgatgtatactattatgtatattctggtgtgcattattatgagggtatcactgtatgcatcgaattctcgctgaaaaaagcgtcaatatcactgagttacgtaaaaacccagctaaatactttattgatcaaccggttgcggttctttctaataatcgccccgcaggatatctcttaagtgccagcgcattcgaagcgttaatggacatgcttgctgaacaagaggagaaaaagcccataaaggcgcgcttccgtccaagtgctgcaagattagaggaaattacacgccgcgctgaacaatatcttaatgatatgacggatgatgatttcaatgactttaaggaataaggatgcgggtattcaaaacaaaacttattcgcctgcaacttacagcagaggaacttgatgcgttaacggcggattttatttcctataagcgtgacggtgttttgccagatatatttggtcgcgatgcactctacgacgactcctttacctggccattaatcaaatttgagcgagttgctcatattcatctggcaaatgagaataatccatttccgccacagttgcgccaattcagcagaacgaatgacgaagcgcatttggtatattgtcagggggcgtttgatgagcaagcatggttgctcattgccattctgaaacctgaacctcataaactggctcgagataacaaccaaatgcataaaattgggaaaatggcagaagcgtttcgcatgcgtttttgaatttatattatgaataacatacaaataagaaactatcagcctggcgattttcagcaactatgcgctattttcattagagcggttacgatgaccgccagtcagcattatagtccacaacaaatttccgcctgggcgcagattgacgaatctcgctggaaggagaaactcgcgaaaagtcaagtgtgggttgcgatcattaatgcacaaccggttggttttatttcccgcattgaacattatatcgatatgttatttgttgaccctgaatacacccgccgtggggttgccagcgctttgttaaaacctttgattaagtctgaatccgaacttacggtggacgcaagcataaccgcaaaacccttttttgaacgttatggttttcagacagttaagcagcagcgcgttgaatgccggggagcgtggtttactaatttttatatgcgatataaaccgcaacattaaatccagcttgcaatgaaaataacgcccgcctggtatgtgcgcgttttctgattccacaaactgcaaggaggtaaatcatgacaaatcctttatcaatgactctttgcagacctttccaggattaattctttttttcttgccctggattcgtctgccatttcctgatttttatatttatatactctaaataattcgagttgcaggaaggcgacaagcgagtgaatcgccaggagcttacataagtaagtgactggggtgaacgaacgcagtcgcagtacatgcaacttgaagtatgacgagtataaatggaatggtacatgggcaaatatattcgtcccttatccgatgcggtatttaccatcgcatctgatgacctgtggatcgagagtttagcgatccaacaattacacaccacggcaaatttacccaacatgcagcgcgtagtggggatgccagatttacaccccggacgcggctacccgattggcgcagcgttcttctctgttggtcgtttttacccggcaagacgtcgcggtaacggtgctggaaacagaaacgggccgctactctgacacactgcgtagcgcgctggtttctctcgatggcgataacgcatgggcattaagcgaaagctggtgtggcactattcagtggatttgtccgagtccgtatcggcctcatcatgggcgcaaaaactggtttctgggcattgggcgttttaccgctgatgagcaggaacaaagcgatgcaatccgttatgagacgctgcgtagcagcgggccgggcggtcaacatgtcaataaaaccgacagcgcggtacgcgccacgcatttggcatccggtattagcgtgaaggttcagagtgagcgtagtcagcatgctaacaagcggctggcacgattgctgattgcctggaagctggagcaacagcaacaggaaaatagcgcggcgctgaaaagccagcggcgaatgttccatcaccagattgaacgtggcaacccgcgacggacatttacagggatggcttttatcgaaggataatgaaggatgaaactgccggaaggcgattaaacgccatccggcagcaaatcaaataattacttcgccggaatttctttcagcagttcagtcagcagtgtccagtaatgacctacgctttcgatgtgaacttgctcatccggagagtgtggaccggtgatagttggcccgatagaaaccatgtccatttccggatacggttttttgaacagaccacattccaggcccgcgtggataatctggatgttcggcgtcttgttgaacaggcgctgataggtttcacgtaccagatgcatcaccggagaattagcgtccggctgccagccaggatatgcgcctttcgcttcggttttcgcgccagccagtttacccaggctatccagcatgctcaccacgtagtctttaccgctgtcgatcagactacggatcaggcagtgaatttctacgttattgtcagtcatggtcaccacaccgacgttcagggaggtttcaaccacacctttggctacatcggagttacgaatcacaccgttcggggtggcgttcagcagacgaataaaggtatcgcgagatttcgcaatcagggcagctttatcgttcgctacagagtccagcaacaaggccagatttttctctttttctgccagctcgtttttcaggatctcctgataggtattcaccagagatttcaggacgtcgactttatcagctgcgacagcaatggtcgcaaaggcttcacgcgggatggcgttacgcagtgtgccgccgttgaaatcgataaggcgcagatccagttcttccgcatgacccgccaggaagcgcaccagcagtttgttggcattacccagcccaacgtggatttccccgccggagtgaccgcctttcagaccttttaaggttaacttgaaggtttcaaaaccagctggaaccgcttcacgatctaaatgcaggttggaggtgaagtcgataccccccgcacaacccatgtagatttcaccttcttcttcggagtcggtgttaatcagaatatcagcctgcaaccagttgccctgtaagccgaacgcaccgtccataccggcttcttcggtcatggtcagcagcacttccagcgggccgtgaaccacgttttcgtcagccagaaccgccagcgcagaggccataccaatgccgttatccgcacccagcgtggtgccgcgcgctttaacccattcgccatcaatataaggctggataggatctttcgtgaagtcatgcacggtgtcgttatttttctgcggcaccatatcgaggtgggcctgtaagacgaccggtttacgattttccatacctgcggtagcaggtttacgaatcaggatattacctacctgatcgcgttcgacatggaaacctttctcttttgcccaaccaacaatgtattcagcgagttgctcttcatgataggacgggtgaggaatagaacagattttggcaaaaatatcccacagcggctgtggagataattgagacagttcagacacgttaagtctccttgtcgatcacccgcaaaacagtattgcaggtcacagggttagcagaaaatgttgtcaacacaagacaggcttgcgagatatgtttgagaataccactttatcccgcgtcagggagaggcagtgcgtaaaaagacgcggactcatgtgaaatactggtttttagtgcgccagatctctataatctcgcgcaacctattttcccctcgaacactttttaagccgtagataaacaggctgggacacttcacatgagcgaaaaatacatcgtcacctgggacatgttgcagatccatgcacgtaaactcgcaagccgactgatgccttctgaacaatggaaaggcattattgccgtaagccgtggcggtctggtaccgggtgcgttactggcgcgtgaactgggtattcgtcatgtcgataccgtttgtatttccagctacgatcacgacaaccagcgcgagcttaaagtgctgaaacgcgcagaaggcgatggcgaaggcttcatcgttattgatgacctggtggataccggtggtactgcggttgcgattcgtgaaatgtatccaaaagcgcactttgtcaccatcttcgcaaaaccggctggtcgtccgctggttgatgactatgttgttgatatcccgcaagatacctggattgaacagccgtgggatatgggcgtcgtattcgtcccgccaatctccggtcgctaatcttttcaacgcctggcactgccgggcgttgttctttttaacttcaggcgggttacaatagtttccagtaagtattctggaggctgcatccatgacacaggcaaacctgagcgaaaccctgttcaaaccccgctttaaacatcctgaaaccagcacgctagtccgccgctttaatcacggcgcacaaccgcctgtgcagagcgcccttgatggtaaaaccatccctcactggtatcgcatgattaaccgtctgatgtggatctggcgcggcattgacccacgcgaaatcctcgacgtccaggcacgtattgtgatgagcgatgccgaacgtaccgacgatgatttatacgatacggtgattggctaccgtggcggcaactggatttatgagtgggccacccaggcgatggtgtggcaacaaaaagcctgtgcggaagacgatccgcaactcagtggtcgtcactggctgcatgcggctacgttgtacaacattgccgcctatcctcatctgaaaggagatgacctggccgagcaagcgcaggctttgagtaaccgcgcctatgaagaggccgctcagcgtctaccgggcacgatgcggcagatggagtttaccgtacccggcggtgcgcccatcaccggctttttgcatatgccgaaaggcgatggcccgttcccgacggtattaatgtgtggtggtctggatgcgatgcagacggactattacagcctgtatgaacgttattttgcgccgcgcggcattgcgatgctgactattgatatgccgagcgtgggcttttctagtaaatggaagctcacccaggactccagcctgttgcatcagcacgtcttaaaggcgctgcctaacgtaccgtgggtggatcacactcgcgtcgcggcctttggtttccgtttcggcgctaacgttgccgtgcgtctggcataccttgaaagcccgcgtctgaaagcggttgcctgtcttggtccggtagttcataccctgttgagtgattttaagtgccagcaacaggtgccggaaatgtatcttgacgttctggccagtcgtttggggatgcatgatgcttccgatgaagcgttgcgcgtggagctgaatcgctatagtttaaaagtgcaaggattgctgggacgtcgctgcccaacgccaatgttaagtggctactggaagaacgatccgttcagcccggaagaggacagtcgcttaatcaccagtagttctgctgacggtaaattattagagatcccatttaacccggtgtatcggaattttgacaaaggtcttcaggaaatcaccgactggatcgaaaaacgcttgtgttaaaaatttgctaaattttgccaatctggtaaaacagttgcatcacaacaggagatagcaatgacgttaccgagtggacacccgaagagcagattgatcaaaaaatttaccgcactaggcccgtatattcgtgaaggtaagtgcaaagataatcgattctttttcgattgtctggctgtatgcgtcaacgtgaaaccggcaccggaagtgcgtgaattctggggctggtggatggagctggaagcgcaggaatcccgttttacctacagttaccagtttggtctgttcgataaagcaggcgactggaagagtgttccggtaaaagacactgaagtggttgaacgactggagcacaccctgcgtgagtttcacgagaagctgcgtgaactgctgacgacgctgaatctgaagctggaaccggcggatgattttcgtgacgagccggtgaagttaacggcgtgagtgaaatgtgccggatgcatcacatccggcaatattcattaaaactgatacgtcatgccaaccgcgacaatatcatcattattaatattcaatttgttatcgctatccagttggttgattttataatcaacaaacgcactcatatttttgttgaaataatacgtagcaccgacgtcgatataattgaccagatcttcatcaccgataccttcaatatctttccctttgcttaagacataacccaggcttggacgcagaccaaagtcaaactggtattgagcgaccgcttcaaagttctgtgtcttattggcaaagccgccagttattggcgtcattttgcgtgtttcagaatagaaagttgccagataaatattattggcatcgtatttcagacctgttgcccatgcttctgcacgcttgcctgtgccacggctttgcaggttctgctcgttggtgcgatcactgttggtataggccccactaatggcgaaatcgctgccgccaaagtcatatgtcaaactcgtgccgaagccatcgccgttttgctttttaacgtcgcggttttcgtttttcccttgatattgcagggttaagttcaggccatcgataacgccgaagaagtcggtgttccgatacgtcgccagaccgctggcgcgtttggtcataaagttgtcggtctgcgcgctggaatcgccaccaaattccgggaacatatcggtccaggcttccacgtcatacaacgcccccaggttacgaccataatcgaaagaacccaaatctttatatttcaacccggcaaaagcgagacgcgttttttgctgtgcagtatcactctctgctttattaccggcaaactctgcttcccaacgaccataaccagtcagttgatcgttaatttgtgtttcgcctttgaaaccaaaacggatataactctggtcgccatctttactggcgttatcactcatataatgcatggctttaactttgccatagacatccagtttattaccgtctttattatatatttctgcagcctgtacagatgcagatgccacaatgcccatcaccactaatgccagagtgctctttttcattttcattcctgattttaattaacgcgcgaatattcagcgggagagtcccgttgaaaacaggaaagtttttaacctgagattgttaaagatatattacagattaataatattcttaaaatgtggtaatttattaaatctgtaataaaagcgtaaacaactgccgctaggcttgctgatcccgcgcaacaaaacgccatgctttgctcgcagatggttggcaaccgacgacagtcctgctaaaacgttcgtttgatatcatttttcctaaaattgaatggcagagaatcatgagtgacagccagacgctggtggtaaaactcggcaccagtgtgctaacaggcggaagccgccgtctgaaccgtgcccatatcgttgaacttgttcgccagtgcgcgcagttacatgccgccgggcatcggattgttattgtgacgagcggcgcgatcgccgccggacgtgagcacctgggttacccggaactgccagcgaccatcgccagcaaacaactgctggcggcggtagggcagagtcgactgattcaactgtgggaacagctgtttagcatttatggcattcacgtcgggcaaatgctgctgacccgtgctgatatggaagaccgtgaacgcttcctgaacgcccgcgacaccctgcgagcgttgctcgataacaatatcgttccggtaatcaatgagaacgatgctgtcgctacggcagagattaaggtcggcgataacgataacctttctgcgctggcggcgattcttgcgggtgccgataaactgttgctgctgaccgatcaaaaaggtttgtataccgctgacccgcgcagcaatccgcaggcagaactgattaaagatgtttacggcattgatgacgcactgcgcgcgattgccggtgacagcgttagtggcctcggaactggcggcatgagtaccaaattgcaggccgctgacgtggcttgccgtgcgggtatcgacaccattattgccgcgggcagcaagccgggcgttattggtgatgtgatggaaggcatttccgtcggtacgctgttccatgcccaggcgactccgcttgaaaaccgtaaacgctggattttcggtgcgccgccggcgggtgaaatcacggtagatgaaggggcaactgccgccattctggaacgcggcagctccctgttgccgaaaggcattaaaagcgtgactggcaatttcagccgtggtgaagtcatccgcatttgcaacctcgaaggccgcgatatcgcccacggcgtcagtcgttacaacagcgatgcattacgccgtattgccggacaccacagccaagaaattgatgcaatactgggatatgaatacggcccggttgccgttcaccgtgatgacatgattacccgttaaggagcaggctgatgctggaacaaatgggcattgccgcgaagcaagccagctataaattagcgcaactctccagccgcgaaaaaaatcgcgtgctggaaaaaatcgccgatgaactggaagcacaaagcgaaatcatcctcaacgctaacgcccaggatgttgctgacgcgcgagccaatggccttagcgaagcgatgcttgaccgtctggcactgacgcccgcacggctgaaaggcattgccgacgatgtacgtcaggtgtgcaacctcgccgatccggtggggcaggtaatcgatggcggcgtactggacagcggcctgcgtcttgagcgtcgtcgcgtaccgctgggggttattggcgtgatttatgaagcgcgcccgaacgtgacggttgatgtcgctagcctgtgcctgaaaaccggtaatgcggtgatcctgcgcggtggcaaagaaacgtgtcgcactaacgctgcaacggtggcggtgattcaggacgccctgaaatcctgcggcttaccggcgggtgccgtgcaggcgattgataatcctgaccgtgcgctggtcagtgaaatgctgcgtatggataaatacatcgacatgctgatcccgcgtggtggcgctggtttgcataaactgtgccgtgaacagagcacaatcccggtgatcacaggtggtataggcgtatgccatatttacgttgatgaaagtgtagagatcgctgaagcattaaaagtgatcgtcaacgcgaaaactcagcgtccgagcacatgtaatacggttgaaacgttgctggtgaataaaaacatcgccgatagcttcctgcccgcattaagcaaacaaatggcggaaagcggcgtgacattacacgcagatgcagctgcactggcgcagttgcaggcaggccctgcgaaggtggttgctgttaaagccgaagagtatgacgatgagtttctgagtttagatttgaacgtcaaaatcgtcagcgatcttgacgatgccatcgcccatattcgtgaacacggcacacaacactccgatgcgatcctgacccgcgatatgcgcaacgcccagcgttttgttaatgaagtggatagctccgctgtttacgttaacgcctctacgcgttttaccgacggcggccagtttggtctgggtgcggaagtggcggtaagcacacaaaaactccacgcgcgtggcccaatggggctggaagcactgaccacttacaagtggatcggcattggtgattacaccattcgtgcgtaaataaaaccgggtgatgcaaaagtagccatttgattcacaaggccattgacgcatcgcccggttagttttaaccttgtccaccgtgattcacgttcgtgaacatgtcctttcagggccgatatagctcagttggtagagcagcgcattcgtaatgcgaaggtcgtaggttcgactcctattatcggcaccattaaaatcaaattgttacgtaagatcttatcattctcccaccaaaaaattatcttaatgtaacagctggtgtaagtaaattctatcaacgaagatcaatcttatctactgaccaaaaaggcctgatagggcttcgctcactatacatccttggctgcaggtttagttgtacaccactcctaaatttaatgtgttggcaatgtgttcaataaagctcgaacaaattagctcattatgatcggttaatacttcaacttctggttgcatgattgtttgtccgtaaaaagataacgcgcctgccgggtagtagcaggcgcattacgcaataggtaaacaagggaggaagttcagaaatgtaaatcgggaaggttgtacgcaatgttcatcgtactacgttgttacggctttgccgcaacaagccagttgcctgccgcgctcgcagaatgtctgcagcccggagataaggagattgttcctgccagctaaatcccttcctgtcgatacgaaccagctcgtatttttctaccagaaaattcacggcatcggctagggtgataccggcatcgatagtctgtatcaggaatgttcgggttaaatatcagcaaaaagcccgcatcatgaatactggatatgaagcatgagagttacctcagtgtttatataaggattcggtccccctctctggaacggtaactctcaatctgatcggttcctgcgttagttcacatcacgactcattttttcgctctcaccggcatcccatttgccacaaaatatcccgccgtgctcctcggcagcgcttcctgtccacgaatcatatccgctattttctcgccaatcataattgtcgtggcgttcaaattcccggtgataatctgcggcataatgctcgcatccaccacacgcaggccttctaacccgtgtacgcggccttcgccgtcaaccacggacatctcgtcgtaacccattttgcaggtaccgcacggatggaaggcggtttcggcgtggttacgcacgaactcatcgagctgttcatccgtctggcattcgacaccggggctgatttcgcggccacgatactgatccagcgcgggttgatgcatgatctcgcgggtgatgcgaattgcgtcgcggaactcctgccagtcctgctcgtggctcatgtagttaaacagaatcgccggatgctggtgcgggtcgcgggatttaatccgcacatgcccacggcttgggctgcgcatactgccgacgtggcactggaaaccgtgctctttcactgcattgctgccgttatagttaatcgctactggcaggaaatggtactgaatattcggccacgcaaattcctcacggctgcgaataaatccacctgcttcaaagtggttgctggcaccaacgccagtgccgccaaacagccactccgcaccgattttcggctggttccaccactgcagggcagggtagagggaaaccggttctttgcactcatattgcagatacatctccagatgatcctgaagattttcgccgacgccgggtaattcatgcaccagcggaatatcaaactccgccagcagttcagcgttgccgacgccggagcgttgcaggatctgcggactggcaatcgcgcctgcacataacagcacttctttgttggccgttgcgcgggttgggatggtgctgtcgccttccagccattcgacgcccaccgcgcgtttgccgtcaaaaatgatgtgatcggtcatagcgtgagtacgaatggtcaggttaggacggcttttggcctgatcgagatagccacgcgcggtgctggcgcgacggccctgcggcgtgacggtgcgatccatcggaccaaaaccttcctgctgataaccgttgagatcgtccgtgcgcgggtagcccgcctgcacgcccgcttcaatcatcgcttcaaacagcggattgacgccgggtttggaggtagtgacgctcaccgggccatcaccgccgtgatagtcgttttcacccatatcgcgagtctcggccttgcggtagtagggcaggcagtcgaggtagctccagttctccagaccgggttcttgcgcccagttatcgagatccagcgcattgccacggatgtagcacatgccgttgatcaggctgcttccacccagacctttaccgcgtccgcactccatgcggcggttattcataaacggttcaggttccgtttcataggcccagttgtagcgtttaccctgtagcgggaatgccagggcagcgggcatctgggtgcggaagtcaaagcgatagtccgggccgcccgcttcaagcagcagcacggaggtattcggatcttcagtcagacgggtagcgagaacgttgccggcactgccggcaccaataatgatgtagtcaaattgcaaataaacctcctggttagaatatggactggaatttagccatctcaacctggatggacttcacctgggtgtaactctggagcgtcatcacgccgttctcgcgaccaatgccggagtgtttgtagccgccaacgggcatctctgccggggattcgccccaggtgttgatccagcaaatacccgcttccagctgatgaatgacgcgatgcgcgcggttcaggtccgctgtcacgatgcccgccgccaggccgtagtcggtatcgttagcgcggcgaatgacttcgtcttcgctctcgtaggtcagaatggacatcactggcccgaagatctcttcacgcacgatggtcatatcgtcgctgcaatcggtgaacactgtcggtgcaacccatgcgccgttatcgaagccatcgcctttcagtacatcgccgccgcacagtacgcgcgcgccttcctctttgcctttggcgatatagcgcagcacgttatcgcgatgcgggaagctgaccagcgggccgaagttagtttgcggatcgaaaacgtcgcccgcgcgaatgcgctcaacgcgcgccagaattttctgctcaaatgcggctttgcatttcgccggaacgaagacgcgggtgccattggtacacacctgaccggagctgaagaagtttgccatcatggcgatatcggcggcgagatcgagatccgcatcatcgaaaacgatcagcggacttttaccgcccagttccatggtcacttctttcagggaagaggccgcgctgttagccatcacttttttgccgctggcgacaccgccggtaaaactcactttggcaatgcccggatgctcggtcagatattgcccggtctccgcgcccacgcccggcaacacgttaaatacgccgtccggcaggcccgcttcgctgtaaatttcagccagctttaacgcggtaagcggggtaacttcgctcggtttgaaaatcattgcgttgcctgccgccagcgccggggcggatttccacagggcaatctggatcgggtagttccatgcgccaatccctgccactacgcccagcggttcgcggcgggtatacacaaaggacgtttcacgcaacgggatctggctgccttccagcgccgggatcagcccggcgtagtactccagcacgtccgcaccggtaacgatatcgacggtactggtttcgctatatgcttttccggtgtcgagggtttccagttttgcgagttcgtcattgcgttcacgcagaatatcaacggcccgacgcagaatacggctgcgctccatggcggtcatgctcgcccagattttttgcccctgctgggcgcttttcacggcgcgatcgacatcctcgcgcccggcggcctgcacggtcgccagcacgttaccgttggccgggttaatggtctcgaaggtgcgaccgctggtggcggaggtataaccaccatgtatataaagctgctgttctgccattcgggacatcacgtctcctcggttaatcggtgggtagatgctgagtgataaagtggcgggtcagggaattagcgcgggttttatccagcggtttgccgctcagagccgcgcgcagccataatccatcaatcagcgcggccaggccgtagcccgcttcctgtgcctgttcgcgcggcaattcgcgacgaaactcgctcaccagattgctcagcaagcggcggctgctgacctgctgtaaacgatagagcatcggctgatgcatactgctggcccagaacgccagccaggctttcatcgccgcactgctcacctgcgtttcatcgaagtttccgccaacaatcgcctgtaatcgctgctctgcactgccctgcggaagtgcatgtaatcgattcaaaaccgcgtcacgcagctgactggtgatatcgcgcatggttgcttccagcagaccatttttgtccctgaaatagtggctgatgatccccgtagaaacgcctgcacggcgggcgatctgcgcgatcgttgcatcgtgcatgcccacttcatttattgcttccagtgtggcgtcgatcagttgtctgcgccggatgctctgcatccccaatttgggcattttcgccactccattcatcagcggtgtttatctattaaagcggttattgattggacgttcaatataaaatgtgtcttaattgttacgaatttgattttaaatagtaacaataacagtggggatactggatgacagaccttagtcacagcagggaaaaggacaaaatcaatccggtggtgttttacacctccgccggactgattttgttgttttccctgacaacgatcctgtttcgcgacttcagcgccctgtggattggccgcacgctggactgggtttctaaaaccttcggttggtactatctgctggcggcaacgctctatattgtctttgtggtctgtatcgcttgtagccgttttggtagcgtgaagctcgggccagaacaatccaaaccggaattcagcctgctgagttgggcggcgatgctgtttgctgccgggatcggtatcgacctgatgttcttctccgtagccgaaccggtaacgcagtatatgcagccgccggaaggcgcgggacagacgattgaggccgcgcgtcaggcgatggtctggacgctgtttcactacggcttaaccggctggagcatgtatgcgctgatgggcatggcgctcggatactttagctatcgttataatttgccgctcaccatccgcagcgcgctgtacccgatcttcggtaaacggattaacgggccgataggtcacagtgtggatattgcagcggtgatcggcactatcttcggtattgccactacgctcggtatcggtgtggtgcagcttaactatggcttgagcgtactgtttgatattcccgatagcatggcggcgaaagcggcactgatcgccttgagcgtgataatcgccacgatctctgtcacctccggtgtcgataagggcattcgcgtgttaagcgagcttaatgtcgcgctggcgctgggattgatcctgttcgtattgtttatgggcgacactagcttcctgcttaatgcactggtgctgaatgttggcgactatgtgaatcgctttatgggcatgacgctcaacagttttgccttcgaccgtccggttgagtggatgaataactggacgctcttcttctgggcatggtgggtggcatggagcccgtttgtcggcttgttcctggcgcgtatcagccgtgggcgtaccattcgccagttcgtgctgggcacgttgattattccgtttaccttcacgctgttatggctcagcgtgttcggcaatagcgcgctgtatgaaatcatccacggcggcgcggcatttgccgaggaagcgatggtccatccggagcgcggcttctacagcctgctggcgcagtatccggcgtttacctttagcgcctccgtcgccaccattactggcctgctgttttatgtgaccagcgcggactccggggcgctggtgctggggaatttcaccagccagcttaaagatatcaacagcgacgcccccggctggctgcgcgtcttctggagcgtggcgattggcctgctgacgctcggcatgctgatgactaacgggatatccgcgctgcaaaacaccacggtgattatggggctgccgttcagctttgtgatcttcttcgtgatggcggggttgtataaatctctgaaggtagaagattaccgccgtgaaagtgccaaccgcgataccgcaccgcgaccgctggggcttcaggatcgcctgagctggaaaaaacgtctcagccgcctgatgaattatccgggcacgcgttacactaaacagatgatggagacggtctgttacccggcaatggaagaagtggcgcaggagttgcggttgcgcggcgcgtacgtggagctaaaaagcctgccaccggaagagggacagcagttgggtcatctggatttgttggtgcatatgggcgaagagcaaaactttgtctatcagatttggccgcagcaatatagcgtgccgggctttacctaccgcgcacgcagcggtaaaagcacctactaccggctggaaaccttcctgttagaaggcagccagggcaacgacctgatggactacagcaaagagcaggtgatcaccgatattcttgaccagtacgagcggcaccttaactttattcatctccatcgtgaagcgccgggccatagcgtgatgttcccggacgcgtgattgttattgcataaaaccgcgccatgtctgcatatggcgctgtttctcctacctcttgatacgttatatctatacggttaagcccttagtatctattgatgattaccagacaacagataataaaaaagaaaagaactattgcagcccaaaacctacatttgggctgttgcgaatgttcaataagtttagtcttatttaatgtaaatattgctgatcatttgaaatgacgcattattcatgagaaatgtgtatcgtaaatcaactgaaattaacgcaaccatttgttatttaaggtttaattatctgtgtgtgatattttattgaatgttttaaatattgtttttattggcattgctataatattggttatcatttgctgaatggattcagtcttaatgagtgggtttttaagggacaggcatagagtaatgatacgtatgcataaccaacatctttactcattatgtcattgaatgttgacgctatgtgtttatgagggagaggtattttcagttgatctggattgttaaattcatataatgcgcctttgctcatgaatggatgccagtatgtagtgggaaattataaatattgaaatagtccaactacttctttattaccaaaaatgagtatctgaattttaatattgcattcttgcgtgattatctcctgagtttgacttgtgattacctttttaaggtatttagcgtaactgtttttgagcgagcatcagaggtaaagataatcttcttgatagtgatgtgggatgttatacgtatggcatcgctgatgtttatggttaccccttatgtgtgctcaggaatcgacaggtaatcactcatactgaacagcgataaaagataaaggtgtgttcatgaatagttgtgattttcgtgtttttctgcaagagttcggtacaacggttcatttgagtttgcctggtagcgtatccgagaaagaacgactgctactcaagctgctgatgcagggaatgtctgtaacagaaataagtcagtacagaaatcgcagtgcaaagacaattagtcatcaaaagaaacagctctttgagaaactggggattcagagcgatattactttctggcgcgatattttctttcagtacaatccggagatcatatccgccacggggagtaatagtcacagatatattaatgataatcactatcaccatatcgtcacgcctgaagccatcagtctggcgttggaaaaccacgaattcaaaccgtggatccaaccggttttctgcgcgcagactggcgtactgacgggctgtgaggtgcttgtccgctgggaacatccacaaacgggaattatcccaccggatcagtttattcctctggcggagagttccggtcttattgtcataatgacccgccaactgatgaaacagactgcggatattctgatgccggtaaaacatttgctgccggacaatttccatattggcatcaacgtcagcgcgggttgttttttggcagcgggatttgaaaaagagtgtctgaacctggttaataaattaggtaacgataaaatcaagctggttctcgagctaacggaacgtaaccctattccggtaacgccagaagccagagcgatatttgacagccttcatcagcacaacattacctttgcgctggatgactttggtacgggttatgcgacctatcgttacttgcaggcgttcccggtcgattttattaagatcgataagagttttgtgcaaatggcgagtgtcgacgaaatctccggtcatattgtggacaatattgtcgaactagcgcgtaagcctggtctgagtatcgtggcggaaggggtagaaacccaggagcaggcggatttaatgatcggtaaaggcgttcactttttgcagggctatttgtactctccgccagtaccgggtaataaatttatctctgaatgggtaatgaaagcaggtggttgatgtaaaccgctattcacagcgcatcgggaggttggcagcgattaattctcccgatgcagtaaatcctgatagatccccgttaatatgccatttggcgcaaattgttttttaatccactgcgtcacctgacccgtagcagaatgctgagtcgccagtaacatgcggctatcctggcgcggattatggatttgtcgggtaaccagcagggattgcgtcatcgcctcacggaccatgtaatccggcaaaaaaccaattccttcacctaaaatctggcactgacatttggtgttgaaatctggcaccagaatactctcctgcccgtgcagcaaccagcccacttttttattaatcgtatgcgcggtgtcctccaccataatattagggtagagacgcagttggctttcggcgatgggttccggcacaaaggctaacgggtgatccggggcgatagcaaaagcccagcgaatcgcgccaatttcagtgtaatcaataccgccgccgtccagtagtgtatcgggtgcgccgatggcgatattggcctgattattaataatcgcatcccagacgccgttatacacttcggtggtgacggtaatctggcaggtaggaaactgctttttcagcacctgtaacaagcgtgcggtgtgtttgggcgtataaagcagctgattaatacaaatgcgcacacgcgcttctatgccctggctaatagtatcgattctgcgtttgatggcataaaaatcattcagcaggtcggtagctttgcggaaaaaataacgcccggactccgttaactcaatgctgcgggtactgcgagtgaacagcaccacatccagccccgtctccatacgcttaatggtgtagctaatggcggaagtggttaaacccaactcttctgcggctttactgaagctgccaaaacgcgcagcggtagtaaatgccaacagattctcttcggtaaaaatactgttcattaaaccattctcgccattatctactatgaatttctccagctatgactgtagaggtatcggttaaagatagataatcatttttgaataacttttaatacccgtcgcgtttagtcgtcgcttcgcttaatttttgtccaccatattcactaattacccccacgcagttacccgccagaaaacccagtaacgtcaccgtccagttcatcccgctggcaaaaaacagcgtcatgccgagaaagccaccgggaataaaggacagtaaccagaaacgcccttgccagaccactaccgcgctgaagggtacggtagtaattacgctcgcccagaacgcggacagtccacttacagaggccagccaaccagcagtcagcgcggcgaaaaacgcccacaccatcccggaataattaaccgccagacttctgataaacccgcttttaccgccgcctgcggcataaaaactgcaaaaggcgacgaagccaatggttcctaataattcccatccttgagagagcccgacatgactagacactaactgccaaagccctgcacaaataccgacggtgacacccgttgccgtgagtccgttcatcttgttcccctctggttagacatggacgaaagctactcttacatgtgcagactatagagaaataaaacctgattgagtgaaagggtatcgggtcaaagaaacaaatattgcactaccgcacactgcgaaaagattgttgaatattattcaacaaaaaggcgagatacggcgaattaaatttaagcgggttcttttatcagattatcgttgctattctcaattcatcgaaaacagccacaaaaaccaggggaatgtgaatgagtataaaaaatctacctgccgactatttattggctgcacaacagggtgatatcgataaagtaaaaacctgccttgcgctgggtgtcgatattaatacctgcgatcgtcaggggaaaacggcaattacgctggcaagtttatatcagcaatatgcttgcgttcaggcattaattgatgccggagcggatattaataagcaagattatacctgtttaaatccttttttaattagctgtctgaacgatgatttaacgctactacgaattattttaccggctaaacccgatcttaattgcgtaacccgttttggcggtgtcggcctgacgcctgcctgtgaaaaaggccatttaagtattgtaaaagagcttttggcgcatacggagattaacgttaaccagaccaaccatgtaggctggacgccgctactggaagcgattgtgcttaatgatggtggtattaaacagcaggcgattgtgcagttattgctggaacacggtgccagcccgcatctgaccgataaatatggcaaaacgccactggaactggcgcgggaacggggctttgaagagattgcgcagttactgattgccgcaggtgcataaaccgggaggcttgctatcaacacaccagaaagacggtgtgtgtgggcgctaactgcggatgcggattttctggcgcagcgggggcaaggacaggttgaacaggtctttgccagagcggtaaatatcgcactcccggctcgccagcagttgctgacgctgctttgtgaagagtacgacaatgcgccaaacagttgtcggttggcactcactcactttgatgatctgttccggcatggtgataaggttcagtttgacgatcaaggtattacggttggtcaacatcttcatatagagatgagtcgttgtcggcgttggctgtccccaaccttgcaaatgaccgctgtgaattttcaccttatcgcctggctacagtggcacgacattattcatcagcacctgggggaaaatgaaaccctgtttaattatcgcggcgataatccgttttatcaggcgttaaataaagaattacatattaaacgacgggcagttattcaggccgtaaacgataaacaaaatatcgccagtgcggtcgccagtatgatggggttagggattggccttacgccaagtgccgacgattatttaacaggtctggcgcttattttatttattcccgggcatccggcggaaaaatacaaagaggaattttatctcggtctgcaacgcggcaaaaataataccacattattaagtgccataacgctggaagccgcattacaacaacgctgccgggaaaatattcatcgttttattcacaacattatttatgacatccctgggaacgcaactcaggcaatagaaaaaattaaacatattggctccagttccggctgcgacatgctgtatggcatggccgatggttgtgcgctgagccaaacctacggagggaattatgtcagttaattaaccaaacctacggagggaattatgagtgttaaaatagtcattaaaccgaatacctattttgattctgtcagcctgatgtctatctccacgcgtgcaaataaactcgacggcgtcgagcaggcatttgtggcgatggcgaccgaaatgaataaaggcgtgctgaagaatttaggactgctgacgccggagctggagcaggcgaaaaacggcgacctgatgattgtcatcaatggtaaaagcggtgcggacaacgagcagttactggtggagattgaagaactgttcaacaccaaagcgcaaagcggcagccacgaggcgcgttacgccactattggcagcgccaaaaagcatatcccggaaagtaacctggcggtgattagcgtcaacggtctgtttgccgctcgcgaagcgcgtcaggcgctgcaaaacgatctcaacgtgatgctgttttccgataacgtcagtgttgaagatgaactggcgctcaagcaactggcccacgaaaaagggctgctgatgatggggccagactgtggcacggcgattatcaacggcgcggcgctctgttttggtaacgccgtgcgtcgcggcaacatcggtattgttggcgcatccggcaccggcagtcaggagttgagcgtccgcattcatgaatttggcggcggcgttagccaactgattggcaccggcgggcgcgacctgagcgagaaaatcggcggcctgatgatgctcgacgccatcgggatgctggaaaacgatccgcaaactgaaatcattgcgcttatctccaaaccgcctgcgcctgcggtggcccgcaaagtgctggaacgtgcgcgcgcctgccgcaagccggtggtcgtctgcttcctcgatcgtggcgaaacgccagtggatgagcaggggctacagtttgcccgcggcaccaaagaggcagcgctaaaagcggtgatgctctccggcgtgaaacaggaaaatctcgacctgcatacgcttaaccagccgttgattgcggatgtgcgtgcgcgtctgcaaccgcagcagaaatacattcgtggcctgttctgcggcggcacgctgtgcgacgaaaccatgttcgcggtgatggaaaaacatggcgatgtctacagcaacattcagcccgatccggaattccgcctgaaagatatcaaccgcagcatcaaacacaccttcctcgactttggcgatgacgacttcaccaatggcaagccgcacccgatgattgaccccaccaaccgcatcagtcgcttgatcgaagaggcgcgcgatccagaagtggcggtgatcgtgatggattttgtgctcggatttggaagccatgaagatccggtcggctccaccatcgagacgatcaaagaagcgaaagcgatcgccgctgccgaaggacgcgagttgatcattctcgcctatgtgctgggtaccgatcttgatacgccaagcttagaacaacaaagccagatgctgcttgatgccggagtgattctggcgagcagcagcaccaataccggattgctggcgcgtgaatttatctgcaaaggggaggaagcctgatgagccagagtctgtttagccaaccattgaacgttattaacgtcggcatcgccatgtttagcgatgacctgaaaaagcagcatgtagaagtgactcaactcgactggacgccgccggggcagggcaatatgcaggtggtgcaggcgctggataacattgccgatagcccgctggcggacaaaatcgccgccgctaaccagcaggcgctggagcgtattatccagagccatccggtgctgattggttttgatcaggcgattaacgtggtgccgggcatgacggcgaaaaccattcttcacgccgggccgccgatcacctgggaaaaaatgtgcggcgcgatgaaaggcgcggtcaccggagcgctggtgttcgaaggactggcgaaagatctcgacgaggcggctgaactggcggcttccggggagatcaccttcagcccgtgtcacgagcacgactgcgtgggaagcatggcgggtgttaccagcgccagcatgtttatgcacatcgtaaaaaacaaaacctacggcaacatcgcttataccaacatgagcgagcagatggcgaagattttgcgtatgggcgctaacgaccagagcgtgattgaccgcctgaactggatgcgtgatgtgcagggaccaatactgcgcgacgcgatgaaaattatcggcgaaatcgatctgcgcttaatgctggcgcaggcgctgcatatgggcgatgagtgccataaccgcaataacgccgggacgacactgctgattcaggcgctgacgccggggattattcaggcgggttattccgtcgagcaacagcgcgaagtgtttgagtttgtcgccagcagcgactacttctccggcccgacgtggatggcgatgtgtaaagcggcgatggatgcggcgcatggcatcgaatacagcaccgtggtcaccaccatggcgcgtaacggcgtcgagttcggcctgcgggtcagcggcctgccggggcaatggtttaccggcccggcgcagcaggtgatcggcccgatgtttgccggttataagccggaagatagcgggctggatatcggcgacagcgccatcaccgaaacctacggtattggcggatttgctatggcgaccgcgcccgctatcgtcgcgctggtgggcggcacggtggaagaagctattgatttctcccgtcagatgcgcgaaatcaccctcggtgaaaaccccaacgtcaccattccgctgctcggttttatgggcgtgccgagcgcaatcgacatcacccgcgtgggtagcagcggcattctgccggtgatcaacaccgccatcgcccataaagatgcgggcgtcggcatgattggcgcgggcattgtgcatccaccttttgcctgcttcgagaaagccattcttggctggtgcgaacgttacggcgtctgacctacatgttcatgccggatgcggcgtgaacgccttatccggcctacgaatggcgcaagaatctgtaggcctgataagcgtagcgcatcaggcatttgtcaccattgccggatgcggcgtgaacgccttatccggcctacgaatggcgcaagaatctgtaggcctgataagcgtagcgcatcaggcatttgccaccactgccggatgcggcgtggacgccttatccggcctacgagtggcgcgagaatctgtaggcctgataagcgtagcgcatcaggcatttgtcaccattgccggatgcggcgtgaacgccttatccggcctacgagtggcgcgagaattgtaagcctgataagcgtagcgcatcaggcagtctggcgttggtcataaccccatcaccctctgtagcggacataacaacatgaaagagcttgtggtcgttgccattggtggcaacagcattatcaaagataacgccagccagagcattgagcatcaggcggaggcggtgaaagccgtcgccgatacggtgctggaaatgctggcttccgattacgacattgtgctgacccacggcaacgggccgcaggtcgggctggatttacgccgtgcggagattgcccacaagcgcgaagggctgcccttaacgccgctggcgaactgtgtggcagatacgcagggcggcatcggctatctgatccaacaggcgctgaataaccggctggcgcgtcacggcgagaagaaagccgtcaccgtggtgactcaggtggaagtggataaaaacgatccaggttttgcccatcccaccaagcccatcggcgcattctttagtgacagccagcgtgacgaattacaaaaggcaaaccctgactggtgttttgttgaagatgccgggcggggctatcgccgcgtggtcgccagcccggaaccgaaacgtattgtcgaagcacctgccattaaagcgctgatccaacaaggttttgtcgtaattggcgcgggcggcggtggaattccggtagtgcgtactgacgcgggagattaccaaagcgtggacgcggttatcgacaaagatctctctaccgcgctgctggcccgtgaaattcacgccgacattcttgtgatcaccactggcgtcgaaaaagtgtgtattcactttggcaaaccgcagcagcaggcgctcgatcgggtggatattgccaccatgacccgctatatgcaggaagggcatttcccgcccggcagcatgttgccaaaaatcatcgccagcctgacatttttagaacaaggcggcaaagaagtgattatcaccacgccggaatgcctgcctgcggcgctgcgcggcgaaacgggcactcatattattaaaacgtaaggacgtaagatgaaagaaagcaatagccgccgtgaatttctgagccagagcggtaagatggtcaccgccgccgcgctgtttggtacctctgtgccgctcgcccatgcggcggtagctggcaccctaaactgcgaagcgaacaacaccatgaaaatcactgacccgcattactatctcgataacgtgctgctggaaaccggttttgactacgaaaatggcgtggcggtgcagacccgcacggcgcgccagaccgtggagattcaggacggcaaaattgtcgccctgcgcgagaacaagctgcatccggacgccacgctgccgcactatgacgctggcggtaagctgatgctgcccaccacccgcgacatgcatattcatctcgacaaaaccttttacggcgggccgtggcgcagcctcaatcgtccggcaggcaccaccatccaggacatgatcaaactcgagcagaaaatgctgccggaactgcaaccgtacactcaggagcgggcagaaaaactgattgatttattgcagagcaaaggcaccaccattgcccgcagccactgcaatatcgaaccggtttccggcctgaaaaatctgcaaaatttgcaggcggtgctggcgcgacgtcaggcgggctttgagtgtgaaatcgtcgccttcccgcagcacggtttgctgctgagcaaatctgaacctttaatgcgtgaagcgatgcaggcgggggcgcattacgtcggcggcctggacccgaccagtgttgatggcgcgatggaaaaatccctcgacaccatgttccagattgcgctggactacgacaaaggcgtcgatattcacctgcacgaaaccactccggcaggcgtggcagccatcaattatatggttgaaacggtagagaaaacgccacagctgaagggcaagctgaccatcagtcacgcctttgcgctggcaacgctcaacgagcaacaggtagatgaactggcgaaccggatggtggtgcaacaaatttctatcgccagcacggtgccgattggcacgctgcatatgccgctcaaacagttgcacgacaaaggcgtaaaagtgatgactggcactgacagcgttatcgaccactggagcccttatggtctgggcgacatgctggaaaaagccaatctgtacgcgcagctctatattcgtcctaacgaacagaacctctcccgcagcctgtttttagccactggcgatgtattgccgctgaatgaaaaaggcgagcgtgtatggccaaaagcgcaggatgacgccagctttgtgctggtggacgcctcctgttccgccgaggcggtggcgcgtatcagcccgagaaccgcaacgttccataaagggcaactggtgtgggggagtgtggcaggttgatgcgcatttgaaacgcctgcaacggtgaatagtaagagatttaagccccagggagtggggcaatctgaatatgagtgtgtcggcagaaatggacattatctttgaggaatatgcccttattgacgttgtgtagataactatttgtctacgtgaaaagatcatcagttttgccgattttagtcttttacagatagcaaatatcacacttacaggcgctcgccttatggggaacgttgctgctctgtttcattcaggctcgcggcatgttggggctggatcgggtggtttaaatattggctatattcaatggacgcgttttgccgcgatgacatatcaggcgttgccaaatacacatagctaatcaggagtaaacacaatgaagatcaaagctgttggtgcatattccgctaaacaaccacttgaaccgatggatatcacccggcgtgaaccgggaccgaatgatgtcaaaatcgaaatcgcttactgtggcgtttgccattccgatctccaccaggtccgttccgagtgggcggggacggtttacccctgcgtgccgggtcatgaaattgtggggcgtgtggtagccgttggtgatcaggtagaaaaatatgcgccgggcgatctggtcggtgtcggctgcattgtcgacagttgtaaacattgcgaagagtgtgaagacgggttggaaaactactgtgatcacatgaccggcacctataacagcccgacgccggacgaaccgggccatactctgggcggctacagtcaacagatcgtcgttcatgagcgatatgttctgcgtattcgtcacccgcaagagcagctggcggcggtggctcctttgttgtgtgcagggatcaccacgtatagcccgctacgtcactggcaggccgggccgggtaaaaaagtgggcgtggtcggcatcggcggtctgggacatatggggattaagctggcccacgcgatgggggcacatgtggtggcatttaccacttctgaggcaaaacgcgaagcggcaaaagccctgggggccgatgaagttgttaacagtcgcaatgccgatgagatggcggctcatctgaagagtttcgatttcattttgaatacagtagctgcgccacataatctcgacgattttaccaccttgctgaagcgtgatggcaccatgacgctggttggtgcgcctgcgacaccgcataaaagcccggaagttttcaacctgatcatgaaacgccgtgcgatagccggttctatgattggcggcattccagaaactcaggagatgctcgatttttgcgccgaacatggcatcgtggctgatatagagatgattcgggccgatcaaattaatgaagcctatgagcgaatgctgcgcggtgatgtgaaatatcgttttgttatcgataatcgcacactaacagactgaaaaaattaataaataccctgtggtttaacatattaacttcgctctccacttaactttttagttaaggagagcgaaataatatcaaagtagcagtaaaacctataacgtaaatttaaattgttaaattaacgccctccagtacacaatacttcacacgttagttatgagcgatttctgatagtgcctggtttaatcagagctttattatctgcgacgtttatttttatttaagagagatcgcgatgataagtttaaaagctccgcacaataatttgatgccatatacgcaacaaagcatacttaatacggttaaaaacaatcagttaccagaggatatcaaaagctccctggtttcctgtgtcgatatattcaaggttttgattaaacaatattatgattatccttatgattgtcgtgatgatttagtcgatgacgacaaactcattcatctcatggctgccgtacgagactgtgagtggagtgacgataacgcactcaccataaatgtgcagtttaatgatttccctggattttatgactggatggattaccctgatcacccggttaagtttgtttttcacatacttgaaaatcaaaaagggacagtttgggtatatgaccaggatgatgcgtttcttgatattaaagcaaacgtgcaggctggacgctttaccgggcttaagaaattagtgcagtttatcgatagtgtgcgaacagattgcaaatgtattcttcttgaataccatatgcctttgctgagaattttccctaaagggaaagagtgtatgcatgtggaaaaatggcttcgcgaaatgagctctattccggagacagacgcgcccattaagcaggcgcttgcgcatggattattattacacttaaaaaatatctaccctgtttttcctgaaagtctggtgatgttattgctctctgttctggacgtaaaaacatacagagatgatgcgcgattaaatgaatggatatctaatagagtgcaggaattaggtgacagatattatcctgtaaataagcacgttaaaatccgctacactctttaattcagaaagggttccacctgcaagttgttattccacctgagagtgaatcgcaatgcaggtaatcatttcatctgtatatctgtatgccaactggcattccatctcttttttcgccgatattttgttgtgatcggcgacacttcgcttaaaaaagcaccagtagtggtttcgcagccatgcggtgtataaaaaatgatctcatgcagatgttttgtgaatgtgttggttgacattcatatgaaaaaaatcataattccatcatgtttgtgtggggtcttttctgtatcttacgcatcgcactcaagcctgacagaaaatatgctgtaaggctcatatcaaaaaccgccattagctcatcaggaagagcagacgacaaccaggattgttgtatggtacggggttcgaggcctcgatggcggtccaacttttcaaaactcttctgaatcagatccccttattaagttccctgcaaagtggaacattgccattgtttggctatagtggatggggcagaccaatgaaaaaagcccacacaggggagagtgggctgaaatgggaggctaaagacagtagtaaacttatcggaaataaggaccacgcattacgggggctaagtagcccgatggccgtgattcggcaaatcaggttgattacgtaaagagtaaattatctgctcaccgctgcgtcaccccttcgtaaatcaggcgtagcgcgaatacaccaataattgcaccaataacccgactggcaacgcgttgcatacgcccataagcacgacgcacagcgggcaaagaaaacgcctgactaagaaaaactcgccagataatacttgcgagcacaatccccgcccaggccattaaacgtgcccatgttggtgtttctgcatttaatgttacactgaaaatactgataaaaaataaaacggtttgcgggttagagagatcggtaattaatccgcggcgaaaaaagacataccagggggcgctaatcggttgttgtagtgtgctcatttgcggtgtactctggcggcgcatgctgcaccacgcaaaccataagagataagcgccgccgacgattctgataaggctaaaaatctcctcacactgcgtaattagcgttgcaagaccaaacaaacccaacccggaataaaatgcatcgcccagcgccacgcccagcccggtcagcacccctgcgcgtcgaccggaagccaggctggtttgtactaccacaaagagattggctcccggattaaaaaaagtaatcacgaacagtcctacggtcaggtaaacggcatgcaaaggatccatagtgatttcatccataaataagtgaactaactgcatcatatttctaccaaaaataatcgggtgcgagagagatcacaaagtgtcttatttccggttactggcgtttatgccctgactgaactaattattaatcaacccaataatgtgggtgggtgatagtgtgataacaactctggagccgtaatatgaaaataatctctaaaatgttagtcggtgcgttagcgttagccgttaccaatgtctatgccgctgaattgatgaccaaagcggaatttgaaaaagttgaaagccagtatgaaaaaataggtgatattagtaccagcaatgaaatgagcactgcagatgcaaaagaagatttgatcaaaaaagcggatgaaaaaggggctgatgtgttggtactgacctccggtcaaactgacaataagatccacggcacggcaaatatttataagaagaagtaattctgaatcctatgtaaacatctccgatgcgtaagtttatcggtgatcatctattgaaatttatgccggataaagcgttcgcgctgcattcggcagttcagcttttcagccgccgccagaacgtcgtccggctgatgcctaaataattcgccgctgctgttttatcgccattaaatttctccagtgcctgttgtggtgtcagtaagcgtggagcgggagttttcgcgctctcgcgcgccagttccggcagtagcagttgcataaactgcggcgttaaatccggcgtcggttccacacttaaaaacagcgccagtcgttccatcatattgcgcagttcacgaatattgcctggccagtcgtagtgcagcagcacagtttcacttgcctgtaacccctggcgtaatgcagcagaaaatggggcggagagcgccgccagagacactttcaaaaagctttccgccagcggaagaatatccgccacccgctcgcgcagtggtggcaattgcagacgcaaaatactcagccgataaaacagatcacggcgaaaacgtccttgctgcatatcttcttccagattgcagtgagtggcgctaatgacccgtacatctaccggaacaggctgatgcccgccgacgcgggtgacctctttttcttccagcacccgcagcagccgggtctgcaaaggtagcggcatttcgccaatctcatccagaaacagcgtaccgccgtgggcaatttcgaacagcccggcgcgacctccgcgtcggctgccggtaaacgccccttcctcatagccaaacagttctgcttccagcaggctttcggcaatcgccccgcagttgacggcaacaaacggatggctctttttgccctgtcgcgcatcgtggcgggcaaaatattcccgatgaatcgcctgggccgccagctctttgcccgtccccgtttccccctcaatcaacaccgccgcactggagcgggcatacagcaaaatagtctgccgtacttgttccatctgtggactttgaccgagcatatcgcccagcacgtaacgagtacgcagggcgttgcgggtggcatcgtgagtgttatggcgtaagctcatgcgcgtcatatccagcgcatcgctgaacgcctggcgcacggtggcggcggaatagataaaaattccggtcattccggcttcttctgccaaatcggtaatcagccctgcgccgaccaccgcttcggtgccgttagcttttagctcgttaatctgcccgcgtgcgtcttcctcggtaatgtagctacgttggtcgaggcgcaaattaaaggttttttgaaacgccaccagcgctggaatggtttcctgataggtgacaacgccgatagaagaggtgagttttccggcttttgccagtgcctgtaacacatcgtagccgctcggtttaatcaaaataactggcacactcaggcggcttttcaggtacgcgccgttagagccagccgcgatgatggcgtcacagcgttcgtttgccagtttcttgcggatgtaggtcactgctttttcaaagccaagctgaataggggtaatgttcgccaggtgatcaaactcgaggctgatatcgcgaaacagctcgaacaggcgcgttacagataccgtccagataaccggtttgtcgtcattaagccgtggtggatgtgccatagcgcaccgcaaagttaagaaaccgaatattgggtttagtcttgtttcataattgttgcaatgaaacgcggtgaaacattgcctgaaacgttaactgaaacgcatatttgcggattagttcatgactttatctctaacaaattgaaattaaacatttaattttattaaggcaattgtggcacaccccttgctttgtctttatcaacgcaaataacaagttgataacaaaggatgggctatgtctctacactctccaggtaaagcgtttcgcgctgcactgactaaagaaaatccattgcagattgttggcaccatcaacgctaatcatgcgctgttggcgcagcgtgccggatatcaggcaatttatctttctggcggtggcgtggcggcaggtagcctggggctgcccgatctcggtatttctacccttgatgatgtgctgaccgacattcgccgtatcaccgacgtttgtagcctgccgctgctggtggatgcggatatcggttttggttctagcgcctttaacgtggcgcgcaccgtgaaaagcatgattaaagccggtgcggcaggattgcatattgaagatcaggttggtgcgaaacgctgcggtcatcgtccgaataaagcgatcgtcagcaaagaagagatggtggatcggatccgcgcggcggtggatgcgaaaaccgatcctgattttgtgatcatggcgcgcaccgatgctctggcggtagaggggctggatgcggcgatcgagcgtgcgcaggcctatgttgaagcgggtgccgagatgttgttcccggaggcgattaccgaactcgccatgtaccgccagtttgccgatgcggtgcaggtgccgatcctcgccaacatcaccgaatttggtgccacgccgctgtttaccaccgacgaattacgcagcgcccatgtcgcaatggcgctgtacccacttagtgcgttccgcgccatgaaccgcgccgctgaacatgtctacaacgtcctgcgccaggaaggcacgcagaaaagcgtcatcgacaccatgcagacccgcaacgagctgtacgaaagcatcaactactaccagtacgaagagaagctcgacaacctgtttgcccgtagccaggtgaaataaaaaacgcccgttgattgtattcgacagccgatgcctgatgcgtcgctgacgcgacttatcaggcctacgaggtgcactgaactgtaggtcggataagacggatggcgtcgcatccgacaaccgatgcctgatgcgccgctgacgtgacttatcaggcctacggggtgcactgaactgtaggtcggataagacgcatagcgtcgcatccgacaaccgatgcctgatgcgccgctgacgcgacttatcaggcctacggggtgcactgaactgtaggtcggataagacgcatagcgtcgcatccgacaaccgatgcctgatgcgccgctgacgcgacttatcaggcctacggggtgaactgaactgtaggtcggataagacgcatagcgtcgcatccgacaacaatctcgaccctacaaatgataacaatgacgaggacaacatgagcgacacaacgatcctgcaaaacagtacccatgtcattaaaccgaaaaaatctgtggcactttctggcgttccggcgggcaatacggcgctctgcaccgtgggtaaaagtggcaatgacctgcattaccgcggctacgatattcttgatctggcgaaacattgcgaatttgaagaagtggcgcatctgctgatccacggcaaactgccgacccgtgacgaactcgccgcttacaaaacgaaactgaaagccctgcgcggtttaccggctaacgtgcgtaccgtgctggaagccttaccggcggcgagccacccgatggatgttatgcgcaccggtgtttccgcgctcggctgcacgctgccagaaaaagaggggcataccgtctctggcgcgcgggatattgccgacaaactgctggcgagccttagcagcattctcctttattggtatcactacagccacaacggcgaacgcatccaaccggaaaccgatgacgactccatcggcggtcacttcctgcatctgctgcacggcgaaaagccaagccaaagctgggaaaaggcgatgcatatcagcctggtgctgtacgccgaacacgagtttaacgcctccacctttaccagtcgggtgattgcgggcaccggctctgatatgtattccgcgattattggcgcgattggcgcactgcgcgggccaaaacacggcggggcgaatgaagtgagcctggagatccagcaacgctacgaaacgccggacgaagccgaagcagatatccgcaagcgcgtggaaaacaaagaagtggtcattggttttggtcatccggtttacaccatcgctgacccgcgccaccaggtgattaaacgtgtggcgaagcagctcagccaggaaggcggcagcctgaagatgtacaacatcgccgatcgcctggaaacggtgatgtgggagagcaaaaagatgttccccaatctcgactggttctctgctgtttcctacaacatgatgggcgttcccaccgagatgttcacaccactgtttgttatcgcccgcgtcaccggctgggcggcgcacattatcgaacaacgtcaggacaacaaaattatccgtccttccgccaattatgttggaccggaagaccgcccgtttgtcgcgctggataagcgccagtaaacctctacgaataacaataaggaaacgtacccaatgagtgctcaaatcaacaacatccgcccggaatttgatcgtgaaatcgttgatatcgtcgattacgtcatgaactacgaaatcagctctaaagtggcctacgacaccgcacattactgcctgctcgacacgctcggctgcggtctggaagctctcgaatacccggcctgtaaaaaactgctggggccaattgttcccggcaccgtcgtacccaacggcgtgcgcgtccccggaactcagttccagctcgaccccgtccaggcggcatttaacatcggcgcgatgatccgctggctcgatttcaacgatacctggctggcggcggagtggggccatccttccgacaacctcggcggcattctggcaacggcggactggcttagccgcaacgcggtcgccagcggcaaagcgccgttgaccatgaaacaggtgctgaccgcaatgatcaaagcccatgaaattcagggctgcatcgcgctggaaaactcctttaaccgcgtcggcctcgaccacgttctgttagtgaaagtggcttccaccgccgtggtcgccgaaatgctcggcctgacccgcgaggaaattctcaacgccgttagcctggcgtgggtggacggtcagagcctgcgcacctatcgccatgcgccgaacaccggcacgcgtaaatcctgggcggcgggcgatgccacttcccgcgcggtacgtctggcactgatggcgaaaacgggcgaaatgggttacccgagtgccctgactgcgccggtgtggggcttctacgacgtctcctttaaaggtgaaagcttccgcttccagcgcccgtacggttcctacgttatggaaaatgtgctgttcaaaatctccttcccggcggagttccactcccagacggcagttgaagcagcgatgacgctctatgaacagatgcaggcagcaggcaaaacggcggcggatatcgaaaaagtgaccattcgcacccacgaagcctgtattcgcatcatcgacaaaaaagggccgctcaataacccggcagaccgcgatcactgcattcagtacatggtggcgatcccgctgctattcgggcgcttaacggcggcagattacgaggacaacgttgcgcaagataaacgcattgacgccctgcgcgagaagatcaattgctttgaagatccggcatttaccgctgactaccacgacccggaaaaacgcgccatcgccaatgccattacccttgagttcaccgacggcacacgatttgaagaagtggtggtggagtaccccattggtcatgctcgccgccgtcaggatggtattccgaaactggtcgataaattcaaaatcaatctcgcgcgccagttcccgactcgccaacagcagcgcattctggaggtttctctcgacagagctcgcctggaacagatgccggtcaatgagtatctcgacctgtacgtcatttaagtaaacggcggtaaggcgtaagttcaacaggagagcattatgtcttttagcgaattttatcagcgtagcattaacgaaccggagcagttctgggccgagcaggcccggcgtattgactggcagacgccctttacgcaaacgctcgatcacagcaatccgccgtttgcccgttggttttgtgaaggccgaaccaacttgtgccacaacgccatcgaccgctggctggagaaacagccagaggcgctggcgctgattgccgtctctagcgaaacagaagaagagcgcacctttacctttcgtcagctgcatgacgaagtgaacgcggtggccagtatgttgcgtagtttgggtgtgcagcgcggcgatcgggtgctggtgtatatgccgatgattgccgaagcgcatattactctgctggcctgcgcgcgcattggcgctattcacagcgtggtgtttggtggatttgccagctacagcgtggcggcgcgaattgatgacgctaaaccggtgctgattgtcagcgctgatgccggagcgcgcggtggcaaaatcattccctataaaaaattgctcgacgatgcgataagtcaggcgcagcaccagccacgccatgttttgctggtggatcgcgggctggcgaaaatggcgcgcgtcagcgggcgggatgtcgatttcgcgagcttgcgccatcaacacatcggcgcgcgggtaccggtggcgtggctggaatccaacgaaacctcctgcattctctacacttccggcacgaccggcaaacctaaaggcgtgcagcgtgacgtcggcggatatgcggtggcgctggcgaccagcatggacaccatttttggcggcaaagcgggcagcgtgttcttttgcgcaagcgatatcggctgggtggtggggcatagctatatcgtttacgcgccgctgctggcggggatggcgactatcgtttacgaaggattgccgacctggccggactgcggcgtgtggtggacaatcgtcgagaaatatcaggttagccggatgttcagtgcgccgaccgccattcgcgtgctgaaaaaattccctaccgctgaaattcgcaaacacgatctcagcagcctggaagtgctctatctggctggagaaccgctggacgagccgaccgccagttgggtgagcaatacgctggatgtgccggtcatcgacaactactggcagaccgaatccggctggccgattatggcgattgctcgcggtctggacgacaggccgacgcgtctgggaagccccggtgtgccgatgtatggctataacgtgcagttgcttaatgaagtcaccggcgaaccgtgtggcgtcaacgagaaagggatgctggtggtggaagggccgctgccgccggggtgtattcagaccatctggggcgacgacggccgctttgtgaagacttactggagcctgttttcccgcccggtgtacgccacctttgactggggcatccgtgacgctgacggttatcactttattctcgggcgcactgacgatgtaattaacgttgccgggcatcggctggggacgcgcgagattgaagagagtatctccagccatccgggcgttgccgaagtggcggtggttggggtgaaagatgcgctgaaagggcaggtggcggtggcgtttgtcattccgaaagagagcgacagtctggaagatcgtgatgtggcgcacagccaagagaaggcgattatggcgctggtggacagccagattggcaactttggccgcccggcgcacgtctggtttgtcagccaattgccaaaaacgcgatccggaaaaatgctgcgccgcacgatccaggcgatttgcgaaggacgcgatcctggagatctgacgaccattgatgatcctgcgagcttggatcagatccgccaggcgatggaagagtaagttattgtcggatgcgtcgcgcggtgcatccggcactgtgtgccgatgcctgatgcgacgctgacgcgttttatcatgcctacggacctgaaccgtaggtcggataaggcgctcgcgtcgcatccgacaccatgctcagatgcctgatgcgacgctgacgcgtcttatcaggcctacccactgtttttacaccgataatttttcccccacctttttgcactcattcatataaaaaatatatttccccacgaaaacgattgctttttatcttcagatgaatagaatgcggcggattttttgggtttcaaacagcaaaaagggggaatttcgtgagccaagataacaactttagccaggggccagtcccgcagagcgcgcggaaaggggtattggcattgacgttcgtcatgctgggattaaccttcttttccgccagtatgtggaccggcggcactctcggaaccggtcttagctatcatgatttcttcctcgcagttctcatcggtaatcttctcctcggtatttacactagttttctcggttacattggcgcaaaaaccggcctgaccactcatcttcttgctcgcttcagctttggtgttaaaggcagttggctgcctagtctgctactgggcggaactcaggttggctggtttggcgtcggtgtggcgatgtttgccattccggtgggtaaggcaaccgggctggatattaatttgctgattgccgtttccggtttactgatgaccgtcaccgtcttttttggcattagcgcgctgacggttcttagcgtgattgcggttccggctatcgcctgcctgggcggttattccgtgtggctggctgttaacggcatgggcggcctggacgcattaaaagcggtcgttcccgcacaaccgttagatttcaatgtcgcgctggcgctggttgtggggagttttatcagtgcgggtacgctcaccgctgactttgtccggtttggtcgcaatgccaaactggcggtgctggtggcgatggtggcctttttcctcggcaacagcttgatgtttattttcggtgcagcgggcgctgcggcactgggcatggcggatatctctgatgtgatgattgctcagggcctgctgctgcctgcgattgtggtgctggggctgaatatctggaccaccaacgataacgcactctatgcgagcggtttaggtttcgccaacattaccgggatgagcagcaaaacccttagcgtaatcaacggtattatcggtacggtctgcgcattatggctgtataacaattttgtcggctggttgaccttccttagcgcagctattcctccagtgggtggcgtgatcatcgccgactatctgatgaaccgtcgccgctatgagcactttgcgaccacgcgtatgatgagtgtcaattgggtggcgattctggcggtcgccttggggattgctgcaggccactggttaccgggaattgttccggtcaacgcggtattaggtggcgcgctgagctatctgatccttaacccgattttgaatcgtaaaacgacagcagcaatgacgcatgtggaggctaacagtgtcgaataactaagacgcatgtggaggctaacagtgagcaataacgctttacaaacaattattaacgcccggttaccaggcgaagaggggctgtggcagattcatctgcaggacggaaaaatcagcgccattgatgcgcaatccggcgtgatgcccataactgaaaacagcctggatgccgaacaaggtttagttataccgccgtttgtggagccacatattcacctggacaccacgcaaaccgccggacaaccgaactggaatcagtccggcacgctgtttgaaggcattgaacgctgggccgagcgcaaagcgttattaacccatgacgatgtgaaacaacgcgcatggcaaacgctgaaatggcagattgccaacggcattcagcatgtgcgtacccatgtcgatgttagcgatgcaacgctaactgcgctgaaagcaatgctggaagtgaagcaggaagtcgcgccgtggattgatctgcaaatcgtcgccttccctcaggaagggattttgagctatcccaacggtgaagcgttgctggaagaggcgttacgcttaggggcagatgtagtgggggcgattccgcattttgaatttacccgtgaatacggcgtggagagcctgcataaaaccttcgccctggcgcaaaaatacgaccgtctcatcgacgttcactgtgatgagatcgatgacgagcagagccgctttgtcgaaaccgttgctgccctggcgcaccatgaaggcatgggcgcgcgagtcaccgccagccacaccacggcaatgcactcctataacggggcgtataccagtcgcctgttccgcttgctgaaaatgtccggtattaactttgtcgccaacccgctggtcaatattcatctgcaaggacgtttcgatacgtatccaaaacgtcgcggcatcacgcgcgttaaagagatgctggagtccggcattaacgtctgctttggtcacgatgatgtcttcgatccgtggtatccgctgggaacggcgaatatgctgcaagtgctgcatatggggctgcatgtttgccagttgatgggctacgggcagattaacgatggcctgaatttaatcacccaccacagcgcaaggacgttgaatttgcaggattacggcattgccgccggaaacagcgccaacctgattatcctgccggctgaaaatgggtttgatgcgctgcgccgtcaggttccggtacgttatagcgtacgtggcggcaaggtgattgccagcacacaaccggcacaaaccaccgtatatctggagcagccagaagccatcgattacaaacgttgaacgactgggttacagcgagcttagtttatgccggatgcggcgtgaacgccttatccggcctacgtagagcactgaactcgtaggcctgataagcgtagcgcatcaggcaattccagccgctgatctgtgtcagcggctaccgtgattcattcccgccaacaaccgcgcattcctccaacgccatgtgcaaaaatgccttcgcagcggctgtctgccagctgtagtttatgccggatgcggcgtgaacgccttatccggcctacgtagagcactgaactcgtaggcctgataagcgtagcgcatcaggcaattccagccgcagacctgtgtcagcggttaccgactttcatttccgccaacaaccgcgcatttatccaacgccatgtgcaaaaatgccttcgcggcggctgtctgccagctatttttccgccgcaacaaaaccgccgttctctccagtagtggcggggcaagagaaatagctttaagcccgtcatgttgtgtggcaatcgctgctggtaacaatgtggaaagggaagtgcggcgaatcagctccagaaccgcgctaatactgttcgcctcaatgaccacctgtggatgtagccccgctttctcgcagtagtggtcaatttgctctctggtggcaaattccgcgctgagcaggaccagtttttcatcatgcaagcgactcaacgccacctgttcatggacggccagcggatgatgttgcgccacgactaacgctaaactttctgtcagtaaaggaattgcctccagctccgggctatgcacaggcgcgaaggcaatcccaacgtccaactcgtcgcggcaaagcatatcctcgattttctcctggctcatttcctgtagctggagcgtgatgctgggatagcgcgcatagaaatccgccattaaggggccgataaagtagctcgtaaaggtgggggtgacggcgatacgcaggcttcctcgcgtcagatcggcaacatcatgaatcgcccgtttacccgcccccagttcctgtaacgcccggctggcgtactgtcgccagacttctcctgcatcagtgagacgaatcgttcgcccgctacggtcaaacagcggcacgcctaaactctcctctaactggcgaatctgctgggaaagcgcaggttgggagacgtgcaacgcactggcggcacgggtgaagctgccatgttcagccacggcaagaaaataattgatatgtcgagagagcattcgcaacctataagtaaatccaatggaactcatcataaatgagacttttaccttatgacaatcggcgagtagtctgcctctcattccagagacagacagaggttaacggtgaaagagattattgatggattccttaaattccagcgcgaggcatttccgaagcgggaagccttgtttaaacagctggcgacacagcaaagcccgcgcacactttttatctcctgctccgacagccgtctggtccctgagctggtgacgcaacgtgagcctggcgatctgttcgttattcgcaacgcgggcaatatcgtcccttcctacgggccggaacccggtggcgtttctgctagcgtggagtatgccgtcgctgcgcttcgggtatctgacattgtgatttgtggtcattccaactgtggcgcgatgaccgccattgccagctgtcagtgcatggaccatatgcctgccgtctcccactggctgcgttatgccgatagtgcccgcgtcgttaatgaggcgcgcccgcattccgatttaccgagtaaagctgcggcgatggtacgtgaaaacgtcattgctcagttggctaatttgcaaactcatccaagcgtgcgcctggcgctcgaagaggggcggatcgccctgcacggctgggtctacgacattgaaagcggcagcatcgcagcttttgacggcgcaacccgccagtttgtgccactggccgctaatcctcgcgtttgtgccataccgctacgccaaccgaccgcagcgtaaccttatttttaaaccatcaggagttccaccatgattcagagtcaaattaaccgcaatattcgtcttgatcttgccgatgccattttgctcagcaaagctaaaaaagatctcagttttgccgagattgccgacggcaccggtctggcagaagcctttgtaaccgcggctttgctgggtcagcaggcgcttcctgccgacgccgcccgcctggtcggggcgaagctggatctcgacgaagactccattctactgttgcagatgattccactgcgtggctgcattgatgaccgtattccaactgacccaacgatgtatcgtttctatgaaatgttgcaggtgtacggtacaaccctgaaagcgttggttcatgagaaatttggcgatggcattattagcgcgattaacttcaaactcgacgttaagaaagtggcggacccggaaggtggcgaacgtgcggtcatcaccttagatggtaaacatctgccgaccaaaccgttctgacagccatgcgcaaccatcaaaagacgttcacgatgctgctggtactggtgctgattggtcttaatatgcgaccactgctcacctccgtcgggccactgctaccgcaattgcgccaggcgagcggaatgagctttagcgtggctgccctgttgaccgctctgccggtggttaccatgggcgggctggcgctggccggaagctggcttcatcagcatgtcagcgaacgtcgcagtgtcgccatcagtctgttgctgattgccgtcggtgcattgatgcgtgagctttacccgcaaagtgcgctgctgcttagcagcgcactgcttggtggggtggggatcggcatcattcaggcggtgatgcctagcgtgattaaacggcggtttcagcagcgcacgccactggtgatggggctgtggtccgcggctctgatgggcggcggtgggcttggtgccgccataacgccctggttagttcaacatagcgaaacctggtatcaaacactcgcctggtgggcgctgcctgccgttgttgcgctctttgcctggtggtggcaaagcgcccgcgaggtcgcctcttcccacaagacaacaaccactccggttcgcgtggtattcactccccgcgcgtggacgctgggtgtttacttcggtctgattaacggcggttacgccagcctgattgcctggttacccgctttctatattgagattggtgccagcgcgcagtacagcggttccttactggcattgatgacgcttgggcaagccgcaggagctttgctgatgcctgctatggctcgccatcaggatcggcgcaaactgttaatgctggcgctggtgttacaactggtggggttctgcggctttatctggctgccgatgcaattgccggtattgtgggcgatggtgtgtgggttaggtctgggcggcgcgtttccgctctgtttgctgctggcgctcgatcactctgtgcaaccggctattgctggcaagctggtggcgtttatgcagggaatcggttttatcatcgccgggcttgccccgtggttttctggcgtgctgcgtagtatcagcggcaattacctgatggactgggcatttcatgcgctgtgcgtcgttgggctgatgatcataaccctgcgttttgcaccagtacgttttccgcagctgtgggtcaaagaggcatgatgcgacgcttgttcctgcgctttgttcatgccggatgcggctaatgtagatcgctgaacttgtaggcctgataagcgcagcgtatcaggcaatttttataatttaaacactgctttcaactttataatctttgaaataatagtgcttatcccggtcgtttatttcgcgaataacccgacaaggaacgccagccgccacgacgtttggtggaatgtcttttgtgacgatactacccgcgccaataacagaattatccccgatggtgacgcctggattaataaccacatgacttccgatccagacgttattgccaatcgttatcggaaaagagtacatctcgccgttttttctcaattcatggtgtacagggtgtcccgtaacggaaagagtaacgttgggtgcaatcagtacgttatcaccgattgttaccgtgtagtcatcgacaatggttaaattgaaatttgcataaaaattgcggcctatatggatgttggaaccgtaagagaaatagacaggcggttctacccaggcgttttcccctaccgtggcaaacatttctttaatcaggctttctcttttttcaacttcacttggatggctgtgattaaactcatacattaacgttttcccacgaagtcttttttccggtaagccttcgcacatatcggtaaatagcttgcctgctcttattctttcggtcattggcatgttcaatgcgatcactccgttatgatatgttggtcggataaggcgctcgcgccgcatccgacattgattgcttaagcgacttcattcacctgacgacgcagcagggaaagcgggccggggccgctaagcgtgaacacggaaattaaggtgaagcccagcgccaccagacccagcaccagataagcgccctggaaaccgatgctttcatacatattgcccgccagtacagacataaaaatcatcgccagttgcttaaagaagcagaaacagaccagataaatcgtcgcactaaaacgcacttcaaactggctggtaatatatttaaagcagcccaccagcaggaacggtacttcaaacatatgcagcgttttcagaataaccacttccagcgcactggtggcgaagctactgccaataatacgtacagacataatagtgccagccagcagcagggcgtttttcccaccgatgcgattaatgatcagtggcgcaaagaacataatgctggcgttaagtaattcgcccattgtcgttacgtagccaaatacccgcgtaccctgttcaccggtagcaaagaagctagtaaagaaattagcaaactgttggtcaaaaacatcgtaggtgcaggaaacgccaataacatacagactcaaaaaccacagttttggctgtctgaacagttccagtgccagcttaaggctaaatgcgctatggttggcacctaccgcattggcaaccgtggcagaagagggcgcatccgttttggcgaaaaagagtaaaacggcgaggatgagtgcacagccagagcccagccagaaaacaaactgattattgatggtgaacatgatgccgacaatgctggcacacagcgcccagccaacacagccaaacatccgcgcgcgaccaaattcgaaattactgcgacggctgactttctcaataaatgcctctactgctggcgcaccggcgttaaaacaaaagcctagataaataccaccaacaatgcttcctactaaaatgttgtattgtaacagtggcccgaagataaaaataaagaacggcgcaaacatcactaacatgccggtaataatccacagcaggtatttgcgcagcccgagtttgtcagaaagcagaccaaacagcggttggaataataggctgaacagagaaatagcggcaaaaataatacccgtatcacttttgctgatatggttgatgtcatgtagccaaatcgggaaaaacgggaagtaggctcccatgataaaaaagtaaaagaaaaagaataaaccgaacatccaaaagtttgtgttttttaaatagtacataatggatttccttacgcgaaatacgggcagacatggcctgcccggttattattatttttgacaccagaccaactggtaatggtagcgaccggcgctcagctggaattccgcgcttacactcgggctccaggagtcgtcgccaccaatccccatatggaaaccgtcgatattcagccatgtgccttcttccgcgtgcagcagatggcgatggctggtttccatcagttgctgttgactgtagcggctgatgttgaactggaagtcgccgcgccactggtgtgggccataattcaattcgcgcgtcccgcagcgcagaccgttttcgctcgggaagacgtacggggtatacatgtcactcaatggcagatcccagcggtcaaaacaggcggcagtaaggcggtcgggatagttttcttgcggccctaatccgagccagtttacccgctctgctacctgcgccagctggcagttcaggccaatccgcgccggatgcggtgtatcgctcgccacttcaacatcaacggtaatcgccatttgaccactaccatcaatccggtaggttttccggctgataaataaggttttcccctgatgctgccacgcgtgagcggtcgtaatcagcaccgcatcagcaagtgtatctgccgtgcactgcaacaacgctgcttcggcctggtaatggcccgccgccttccagcgttcgacccaggcgttagggtcaatgcgggtcgcttcacttacgccaatgtcgttatccagcggtgcacgggtgaactgatcgcgcagcggcgtcagcagttgttttttatcgccaatccacatctgactaagaaagccactctggcggttaaattgccaacgcttattacccagctcgatgcaaaaatccatttcgctggtggtcagatgcgggatggcgtgggacgcggcggggagcgtcacactgaggttttccgccagacgccactgctgccaggcgctgatgtgcccggcttcactccatgcggtcgcgttcggttgcactacgcgtactgtgagccagagttgcccggcgctctccggctgcggtagttcaggcagttcaatcaactgtttaccttgtggagcgacatccagaggcacttcaccgcttgccagcggcttaccatccagcgccaccatccagtgcaggagctcgttatcgctatgacggaacaggtattcgctggtcacttcgatggtttgcccggataaacggaactggaaaaactgctgctggtgttttgcttccgtcagcgctggatgcggcgtgcggtcggcaaagaccagaccgttcatacagaactggcgatcgttcggcgtatcgccaaaatcaccgccgtaagcgctccacgggttgccgttttcatcatatttaatcaggctctgatccacccagtcccagacgaagccgccctgtaaacggggatactgacgaaacgcctgccagtatttagcgaaaccgccaagactgttacccatcgcgtgggcgtattcgcaaaggatcagcgggcgcgtctctccaggtaggctaagccattttttgatggaccatttcggcacagccgggaagggctggtcttcatccacgcgcgcgtacatcgggcaaataatatcggtggccgtggtgtcggctccgccgccttcatactgcaccgggcgggaaggatcgacagatttgatccagcgatacagcgcgtcgtgattagcgccgtggccactttcattccccaggctccagatgatcacactcgggtgattacgatcgcgctgcaccattcgcgttacgcgttcgctcatcgccggtagccagcgcggatcatcggtcagacgattcattggcaccatgccgtgggtttcaatattggcttcatccaccacatacaggccgtagcggtcgcacagcgtgtaccacagcggatggttcggataatggctacagcgcacggcgttaaagttgttctgcttcatcagcaggatatcctgcaccatcgtctgctcatccatgacctgaccatgcagaggatgatgctcgtgacggttaacgcctcgaatcagcaacggcttgccgttcagcagcagcagaccattttcaatccgcacctcgcggaaaccgacatcgcaggcttctgcttcaatcagcgtgccgtcggcggtgtgcagttcaaccaccgcacgatagagattcgggatttcggcgctccacagtttcgggttttcgacgttcagacgtagtgtgacgcgatcggcataaccaccacgctcatcgataatttcaccgccgaaaggcgcggtgccgctggcgacctgcgtttcaccctgccataaagaaactgttacccgtaggtagtcacgcaactcgccgcacatctgaacttcagcctccagtacagcgcggctgaaatcatcattaaagcgagtggcaacatggaaatcgctgatttgtgtagtcggtttatgcagcaagctgacgtcacggaaaatgccgctcatccgccacatatcctgatcttccagataactgccgtcactccagcgcagcaccatcaccgcgaggcggttttctccggcgcgtaaaaatgcgctcaggtcaaattcagacggcaaacgactgtcctggccgtaaccgacccagcgcccgttgcaccacagatgaaacgcgctgttaacgccatcaaaaataattcgcgtctggccttcctgtagccagctttcatcaacattaaatgtgaggctgtaacaacccgtcggattctccgtgggaacaaacggcggattgaccgtaatgggataggtcacgttggtgtagatgggcgcatcgtaaccgtgcatctgccagttactggggacgacgacagtatcggcctcaggaagatcgcactccagccagctttccggcaccgcttctggtgccggaaaccaggcaaagcgccattcgccattcaggctgcgcaactgttgggaagggcgatcggtgcgggcctcttcgctattacgccagctggcgaaagggggatgtgctgcaaggcgattaagttgggtaacgccagggttttcccagtcacgacgttgtaaaacgacggccagactatccgtaatcatggtcatagctgtttcctgtgtgaaattgttatccgctcacaattccacacaacatacgagccggaagcataaagtgtaaagcctggggtgcctaatgagtgagctaactcacattaattgcgttgcgctcactgcccgctttccagtcgggaaacctgtcgtgccagctgcattaaactatcggccaacgcgcggggagaggcggtttgcgtattgggcgccagggtggtttttcttttcaccagactgacgggcaacagctgattgcccttcaccgcctggccctgagagagttgcagcaagcggtccacgctggtttgccccagcaggcgaaaatcctgtttgatggtggttaacggcgggatataacaactgctgtcttcggtatcgtcgtatcccactacgctgatatccgcaccaacgcgcagcccggactcggtaatggcgcgcattgcgcccagcgccatctgatcgttggcaaccagcatcgcagtgggaacgatgccctcattcagcatttgcatggtttgttgaaaaccggacatggcactccagtcgccttcccgttccgctatcggctgaatttgattgcgagtgagatatttatgccagccagccagacgcagacgcgcgctgacagaacttaatgggcccgctaacagcgcgatttgctggtgacccaatgcgaccagatgctccacgcccagtcgcgtaccgtcttcatgggagaaaataatactgttgatgggtgtctggtcagagacatcaagaaataacgccggaacattagtgcaggcagcttccacagcaatggcatcctggtcatccagcggatagttaatgatcagcccactgacgcgttgcgcgagaagattgtgcaccgccgctttacaggcttcgacgccgcttcgttctaccatgctcaccaccacgctggcacccagttgatcggcgcgagatttaatcgccgcgacaatttggctcggcgcgtgcagggccagactggaggtggcaacgccaatcagcaagctctgtttgcccgccagttgttgtgccacgcggttgggaatgtaattcagctccgccatcgccgcttccactttttcccgcgttttcgcagaaacgtggctggcctggttcaccacgcgggaaacggtctgataagagacaccggcatactctgcgacatcgtataacgttactggtttcacattcaccaccctgaattgactctcttccgggcgctatcatgccataccgcgaaaggttttgcgccattcgatggtgtcaacgtaaatgcatgccgcttcgccttccggccaccagaatagcctggctttcaaccccttcttcgatctgttttgctacccgttgtagcgccggaagatgcttttccgctgcctgttcaatggtcattgcgctcgccatatacaccagattcagacagccaatcacccgttgttcactgcgcagcggtacggcgatagaggcgatcttctcctcctgatcccagccgcggtagttctgtccgtaaccctctttgcgcgcgcgcgccagaatggcttccagctttaacggttcccgtgccagttgatagtcatcaccggggcgggaggctaacatttcgattaattccttgcggtcttgttccgggcaaaaggccagccaggtcaggccgctggcggttttcagaagcggcaaacgtcgcccgaccattgcccggtgaaaggataagcggctgaaacggtgagtggtttcgcgtaccaccattgcatcaacatccagcgtggacacatctgtcggccataccacttcgcgcaacagatcgcccagcagtggggccgccagtgcagaaatccactgttcgtcacgaaatccttcgcttaattgccgcactttgatggtcagtcgaaaactatcatcggaggggctacggcggacatatccctcttcctgcagcgtctccagcagtcgccgcacagtggtgcgatgcaggccgctgagttccgccagcagcccgacgctggcaccgccatcaagtttatttaacatatttaataacattagaccgcgggttaagccgcgcacggttttgtattccgtctgctcattgttctgcatattaatactcatttctatagttaaaacaacgtggtgcacctggtgcacattcgggcatgttttgattgtagcgctaaacacccttcctatactgagcgcacaataaaaaatcatttacatgtttttaacaaaataagttgcgctgtactgtgcgcgcaacgacattttgtccgagtcgtgaggtactgaaatggcaatacaacaccctgacatccagcctgctgttaaccatagcgttcaggtggcgatcgctggtgccggcccggttgggctgatgatggcgaactatctcggccagatgggcattgacgtgctggtggtggagaaactcgataagttgatcgactacccgcgtgcgattggtattgatgacgaggcgctgcgcaccatgcagagcgtcggcctggtcgatgatgttctgccgcacactacgccgtggcacgcgatgcgttttctcaccccgaaaggccgctgttttgctgatattcagccaatgaccgatgaatttggctggccgcgccgtaacgcctttattcagccgcaggtcgatgcggtgatgctggaaggggtgagccgttttccgaatgtgcgctgcttgttttcccgcgagctggaggccttcagtcagcaagatgacgaagtgaccttgcacctgaaaacggcagaagggcagcgggaaatagtcaaagcccagtggctggtagcctgtgacggtggagcaagttttgtccgtcgcactctgaatgtgccgtttgaaggtaaaactgcgccaaatcagtggattgtggtagatatcgccaacgatccgttaagtacgccgcatatctatttgtgttgcgatccggtgcgcccgtatgtttctgccgcgctgcctcatgcggtacgtcgctttgaatttatggtgatgccgggagaaaccgaagagcagctgcgtgagccgcaaaatatgcgcaagctgttaagcaaagtgctgcctaatccggacaatgttgaattgattcgccagcgtgtctacacccacaacgcgcgactggcgcaacgtttccgtattgatcgcgtactgctggcgggcgatgccgcgcacatcatgccggtatggcaggggcagggctataacagtggtatgcgcgacgcctttaacctcgcatggaaactggcgttggttatccaggggaaagcccgcgatgcgctgctcgatacctatcaacaagaacgtcgcgatcacgccaaagcgatgattgacctgtccgtgacggcgggcaacgtgctggctccgccgaaacgctggcagggtacgttacgtgacggcgtttcctggctgttgaattatctgccgccagtaaaacgctacttcctcgaaatgcgcttcaagccgatgccgcaatattacggcggtgcgctgatgcgtgagggcgaagcgaagcactctccggtcggcaagatgtttattcagccgaaagtcacgctggaaaacggcgacgtgacgctgctcgataacgcgatcggcgcgaacttcgcggtaattggctggggatgcaatccactgtgggggatgagcgacgagcaaatccagcagtggcgcgcgttgggcacacgcttcattcaggtggtgccggaagtgcaaattcataccgcacaggataaccacgacggcgtactacgcgtgggcgatacgcaaggtcgcctgcgtagctggttcgcgcaacacaatgctagcctggtggtgatgcgcccggatcgctttgttgccgccaccgccattccgcaaaccctgggcaagaccctgaataaactggcgagcgtgatgacgctgacccgccctgatgccgacgttcctgtcgaaaaggtagcctgatatgcacgcttatcttcactgtctttcccacagcccgctggtggggtatgtcgacccggcgcaagaggtgctcgatgaggtcaatggcgtgattgccagcgcccgcgagcgtattgcggcattctcccctgaactggtggtgctgtttgcgccagatcactacaacggctttttctatgacgtgatgccaccgttctgtttaggcgttggagcgacggcaattggtgatttcggcagtgcggcaggagagctgcccgtgcctgtggagctggcggaggcctgtgcgcatgccgtcatgaagagcgggatcgatcttgccgtttcttactgtatgcaggtggaccacgggttcgcccagccgctggagttcctgctcggtgggctggataaggtgccagttctgcctgtgttcatcaacggtgtcgccacgccgctgcccggtttccagcgtacccgcatgttgggtgaagccattggacgtttcaccagcactctcaataaacgcgtgctgttcctgggttccggtgggctttcccatcagccgccggtgcccgaactggcgaaagccgatgcccatatgcgcgaccgtctgttggggagcgggaaagatttacccgccagtgagcgcgaattgcgtcagcaacgggtgattagcgccgctgagaagtttgttgaggatcagagaacgctgcatccgctcaacccgatttgggataaccagttcatgactttgctggagcagggacgcatacaggaactggatgccgtcagtaacgaagagctttccgccattgccggaaagagcacacatgaaatcaaaacctgggtcgccgcttttgccgctatttctgcgtttggcaactggcgtagcgaagggcgttattaccgcccaatcccggagtggattgccggatttggcagcttaagcgccagaacagagaactgaatatgcaggagaagatgatgagttatcagccacaaaccgaagccgccaccagccgttttctgaatgtagaagaagcgggtaaaacgctgcgcatccattttaatgactgcggacaaggcgacgaaaccgttgtcctgctgcatggttccggcccgggtgctactggctgggcgaacttcagccgcaatatcgatccgctggtagaggcgggctatcgggtgatcctgctggattgtccgggttggggcaagagcgatagcgtcgttaatagtggtagccgaagcgatcttaatgcacgaatcctgaaaagcgtggtggatcaactggatatcgccaaaatccacctgctgggcaacagcatggggggccatagttctgtggcgttcacccttaaatggccggagcgcgtcggcaaactggtgctgatgggcggcggtacgggcggcatgagtttgtttacgccgatgccaaccgaaggtattaagcgactgaatcagctttatcgtcagccgactatcgaaaacctgaagctgatgatggatatcttcgtttttgataccagcgatttgaccgacgccctgtttgaagcgcgcctgaataatatgctgagccgccgcgatcacctggaaaacttcgttaagagcctggaagctaatccgaaacagttcccggattttggcccacgtctggcggaaatcaaagcgcaaaccctgattgtctgggggcgcaacgaccgctttgtgccgatggatgcgggtctgcgtctgctgtccggcattgccggttctgaactgcatatcttccgcgactgtggtcactgggcgcagtgggaacatgccgacgctttcaatcaactggtgctgaatttcctcgcacgcccttaaggaatggtcatgacgaagcatactcttgagcaactggcggcggatttacgccgcgccgcagagcagggcgaagcgattgcaccgctgcgcgatctgattggtatcgataacgctgaagcggcttacgccattcagcacataaatgtgcaacatgacgttgcgcaggggcgtcgcgtggtagggcgtaaagtgggcctgacacatccgaaagtgcaacaacaactgggcgttgatcaaccggattttgggacgttatttgccgacatgtgttatggcgataacgaaatcattcctttttcccgtgttctgcaaccccgcattgaagcggagatcgcactggtgttgaaccgcgatttgcccgcaaccgatatcaccttcgacgaattgtataacgccattgaatgggtacttccggcgctggaagtggtggggagccgcattcgcgactggagcattcagtttgtcgataccgtggcagataacgcctcctgtggggtgtatgtcatcggcggtccggcgcaacgtccggcggggttagacctgaaaaactgcgccatgaagatgacgcgtaataacgaagaggtttctagcgggcgcggcagcgaatgcctgggacatccgcttaatgcggccgtctggctggcacgcaaaatggccagtctgggtgaaccgctgcgcaccggagatatcattcttaccggggcattaggtccgatggtggcggtgaatgcgggcgatcgttttgaagcccatattgaaggcataggtagtgttgctgcgacatttagtagcgcagccccaaaaggaagtctgagttgagctaagccccaaaaggaagtctgtcatgagtaagcgtaaagtcgccattatcggttctggcaacattggtaccgatctgatgattaaaattttgcgtcacggtcagcatctggagatggcggtgatggttggcattgatcctcagtccgacggtctggcgcgcgccagacgtatgggcgtcgccaccacccatgaaggggtgatcggactgatgaacatgcctgaatttgctgatatcgacattgtatttgatgcgaccagcgccggtgctcatgtgaaaaacgatgccgctttacgcgaagcgaagccggatattcgcttaattgacctgacgcctgctgccatcggcccttactgcgtgccggtggttaacctcgaggcgaacgtcgatcaactgaacgtcaacatggtcacctgcggcggccaggccaccattccaatggtggcggcagttagtcgcgtggcgcgtgttcattacgccgaaattatcgcttctatcgccagtaaatctgccggacctggcacgcgtgccaatatcgatgaatttacggaaaccacttcccgagccattgaagtggtgggcggcgcggcaaaagggaaggcgattattgtgcttaacccagcagagccaccgttgatgatgcgtgacacggtgtatgtattgagcgacgaagctagtcaagatgatatcgaagccagtatcaatgaaatggctgaggcggtgcaggcttacgtaccgggttatcgcctgaaacagcgcgtgcagtttgaagttatcccgcaggataaaccggtcaatttaccgggcgtggggcaattctccggactgaaaacagcggtctggctggaagtcgaaggcgcagcgcattatctgcctgcctatgcgggcaacctcgacattatgacttccagtgcgctggcgacagcggaaaaaatggcccagagtctggcgcgcaaggcaggagaagcggcatgaacggtaaaaaactttatatcagcgacgtcacattgcgtgacggtatgcacgccattcgtcatcagtatagcctggaaaacgttcgccagattgccaaagcactggacgatgcccgcgtggatagcattgaagtggcccacggcgacggtttgcaaggttccagctttaactatggtttcggcgcacatagcgaccttgaatggattgaagcggcggcggatgtggtgaagcacgccaaaatcgcgacgttgttgctgccaggaatcggcactattcacgatctgaaaaatgcctggcaggctggcgcgcgggtggttcgtgtggcaacgcactgtaccgaagctgatgtttccgcccagcatattcagtatgcccgcgagctcggaatggacaccgttggttttctgatgatgagccatatgaccacgccggagaatctcgccaagcaggcaaagctgatggaaggctacggtgcgacctgtatttatgtggtggattctggcggtgcgatgaacatgagcgatatccgtgaccgtttccgcgccctgaaagcagagctgaaaccagaaacgcaaactggcatgcacgctcaccataacctgagtcttggcgtggcgaactctatcgcggcggtggaagagggctgcgaccgaatcgacgccagcctcgcgggaatgggcgcgggcgcaggtaacgcaccgctggaagtgtttattgccgccgcggataaactgggctggcagcatgggaccgatctctatgcgttaatggatgccgccgacgacctggtgcgtccgttgcaggatcgaccggtacgagtcgatcgcgaaacgctggcgctgggatacgctggtgtttacagcagcttcctgcgtcactgtgaaacggcggcggcgcgttatggcttaagtgcggtggatattctcgttgagctgggcaaacgccggatggttggcggccaggaggatatgatcgttgacgtggcgctggatctgcgcaacaacaaataatgatgactgccgagaacgtgcattttgtatgcccatcccagcacgactgccggatgcggcgtgaacgccttatccggcctacggatggcgtgagaatttgtaggtctgataagacgcgttagcgtcgcatcaggcatctgcgcacgactgccggatgcggcgtgaacgccttatccggcctacggatggcgcgggaatttgtaggcctgataagacgcgttagcgtcgcatcaggcatctgcgcacgactgccggatgcggcgtgaacgccttatccggcctacgggtggcgcgagaatttgtaggcctgataagacgcgttagcgtcgcatcaggcatctgcgcacgactgccggatgcggcgtaaacgccttatccggcctacggatggcgcgggaatttgtaggcctgataagacgcgttagcgtcgcatcaggcatctgcacacgactgccggatgcgataaacgtcttgtccggcctacatttcgcccgtaggcagtcattaaatagttctgattacgcggctggcaatgtatcagtcgcgattcacctgcactcgcaacgaggttcatcttatgagcactcgtacccctagtagttctagttcccgcctgatgctgaccatcgggctttgttttttggtcgctctgatggaagggctggatcttcaggcggctggcattgcggcgggtggcatcgcccaggctttcgcactcgataaaatgcaaatgggctggatatttagcgccggaatactcggtttgctacccggcgcgttggttggcggaatgctggcggaccgttatggtcgcaagcgcattttgattggcagtgttgcgctgtttggtttgttcagtctggcaacggcgattgcctgggatttccccagtctggtctttgcgcggctgatgaccggtgtcgggctgggggcggcgttgccgaatcttatcgccctgacgtctgaagccgcgggtccacgttttcgtgggacggcagtgagcctgatgtattgcggtgttcccattggcgcggcgctggcggcgacactgggtttcgcgggggcaaacttagcatggcaaacggtgttttgggtaggtggtgtggtgccgttgattctggtgccgctattaatgcgctggctgccggagagcgcggttttcgctggcgaaaaacagtctgcgccaccactgcgtgccttatttgcgccagaaacggcaaccgcgacgctgctgctgtggttgtgttatttcttcactctgctggtggtctacatgttgatcaactggctaccgctacttttggtggagcaaggattccagccaagccaggcggcaggggtgatgtttgccctgcaaatgggggcggcaagcgggacgttaatgttgggcgcattgatggataagctgcgtccagtaaccatgagcctactgatttatagcggcatgttagctagcctgctggcgcttggaacggtgagcagttttaacggtatgttgctggcgggatttgtcgcggggttgtttgcgacaggtgggcaaagcgttttgtatgccctggcaccgttgttttacagtagccagatccgcgcaacaggtgtgggaacagccgtggcggtagggcgtctgggggctatgagcggtccgttactggccgggaaaatgctggcattaggcactggcacggtcggcgtaatggccgcttctgcaccgggtattcttgttgctgggttggcggtgtttattttgatgagccggagaagtcgaatacagccgtgcgccgatgcctgacgtgccttattaggcaggggcgaaagggacttcaccccaatacacctacggcgtttacaggtatactcgctaaaaattattcagcgggtttggaaacaaagatggcaaaacttaccttacaagagcagttgctcaaagcaggattagtcaccagcaaaaaagcggcgaaggtggagagaacggcgaaaaaaagccgcgttcaggcgcgtgaagctcgggcggcggtagaagaaaataaaaaggcacagcttgagcgtgataaacagcttagcgaacagcaaaaacaagcggcgttggcgaaagaatataaagctcaggtgaagcagcttattgaaatgaaccgaatcaccattgccaatggcgatattggttttaacttcactgacggcaatctgattaagaagatttttgtcgataagctcacacaggcgcagttgattaatggtcgtctggcgattgcccgcttgttggtcgataacaatagcgaaggtgaatacgccattattcccgccagcgttgccgataaaattgctcagcgcgatgccagcagtatagcgttgcacagcgcgctcagcgccgaagagcaggatgaagacgacccgtatgccgacttcaaagtgcctgatgatttgatgtggtaaacatagataagtcgtgcgcagatgcctgatgcgacgctatgcgcgtcttatcaggcctacggtttatgggcgaagtgtagaccggataaggcgttcacgccgcatccggcagtcgtgcgccatgcctgatgcgacgctttgcgcgtcttatcaggcctacggcttacgggcgaagtgtaggccggataaggcgttcacgccgcatccggcagtcgtgctattatcaacgcatattcagtttattggcgtggtaggcaatatgctcgccaataaaactggagacaaaataatagctgtgatcataaccctcgtgataacggattaacgtcttgatattcatctcctggcagatcttttcaagatttggagtccgcagctgttctgcgtaaaaatcatcactcaacccctgatcaaccatgatttccgcaacgcgttgaccttgactaataagactcaccgggtcgtaatccaaccaggcatctttattttcagcaagatatgcagcaaaggcttgctgtccccacggcacttggcttggggagacaatggggctaaacgcgctgacgctgacatattcatctgggttacgtaacgccagcaccagcgcgcccagcccgcccatagaatgaccagagatagactttttggccgttgccggaaaatgatgcatcactaaatccggcagctcgttgcggatatagtcatacattttgtaatgttcattccacggcgcttgcgtcgcgttcaggtaaaacccggcaccttgcccgagatcgtaacggtcagcatctgcgacatgactgcctcgcggactggtgtccggcgcaacaacaataatgttgtgctcagccgcgtaacgctgcatcccgcttttagtaatgaaattctgctcgttgcaggtcaggccactaagccagtacagcaccggcaatttttcattcgcggcttttggtgggagatagacgccgacattcatttcacatttcagactttgggaataatgccgatacatattttgccagccgccaaagctgacatgtttttcaatgagttccatcagtcattatctcagggttaatcccccggacggctgcccggggagagtattaagaacccccgcctgaagtggacggggtaaacctgcgggaaatcagtaacgaattacggttcgaatggatttgccttcatgcatcaggtcgaaggcgtcattaatttcatccaggctcatggtatgcgtgacaaacggttccagatcgatatcacctttcatcgcatcttcaaccatgcccggtaactgggaacgacctttcacgccgccaaacgcggaacctttccatacgcgaccagtgaccaactggaatggacgggtggagatttcctgaccggcaaccgcgaccccgatgatcacgctctgaccccagccgcggtgcgcactttccagcgccgcacgcatcacgttgacgttaccgatgcattcaaaggtatggtcgataccccatttgttgatatccaacaggacatcttttatcggtttgtcgtagtcattcgggttaatgcagtcggtagcaccgaagcgacgcgccagatcgaatttcttcgggttggtatcgatagcgataatccgacccgctttcgcctgacgcgcgccctgaaccactgccagaccaatcgcgccaagaccaaacacggcaacagaatcacctggctggactttagctgtgttgtgtaccgcgccaataccggtggtcacgccacagcccagcaggcagacgtgttcatggtttgcttctggattaatttttgccagagacacttccgcgactacggtgtattcactgaatgtagagcaccccatgtagtgataaagcggctgcccgttgtaagaaaaacgggtggtgccgtctggcatcaggcctttaccctgggtttcgcgaaccgcaacacagaggttagttttgccagaacgacagaactcacactcgccgcactccgcggtgtaaagcgggatcacatggtcgccaggtttgacgctggttacgccttcaccgacttcaaccacaacgccggccccttcgtgaccgagaaccaccgggaatacaccttccgggtcatcgccggagagggtaaatgcgtcggtatggcaaacgccggtatgggtgactttaattagcacttcaccttttttcggtggtgcaacgtcaatttcaacgatttccagcggtttaccgggagcaaatgcaacggcagcacgacttttcatctctcgctcttcctcaatatggtaatagattcagttatttaagataggcacgaaccagttcaatagtgtcgtcaacggattggctgacttcgcggctgtagcagtcatttcggtcaaacgtttcccggatatggctttcaagcacttctgccatcagcccattagccgcgccccgaacggcagcgatctgttggagtatggcacggcattcggcatcaccctccaggctccgttccagagcatcaatctgcccccgaatacgacgaactcgagtaaggacctttttcttctcttccggagtactgggcatttcgcacctcatcatctgcatgcaatatactataggggggtattctatatgtcaatgcatacccccctatagtatataacactggagaataaaatttatccggtgaatgtggtcggaaaacaaagaggaaaggggggggctaatcggcagggaaggccgccccggatagcgggcggcagaaggaatcagaatttccaggtcagacgggctgcaagttgcagaccgttacgagatggacggtcccctcgcccccttggggagagggttagggtgagggggcgttcaccgtactttcaacaggttaactccccctttctgagaggaaacaaaattaacgcagaatcttcttctcagccaaatccagcgcaaagtagctgaaaatcagatccgcacccgcacgcttaatgctacctaagctttcgagcacgactttctcttcatctatagcacccgccagcgcggcgaacttaatcatcgcatactcaccgctcacctgatacgcgccaatcggcaattcagtacgttcacgcagctcacgcacgatgtcgaggtacgctccagcaggtttaaccatcaggcagtctgcgccctgggcttcatccagcagactttcacgaatcgcctcacgacggttcattgggttcatctgatagcttttgcggtcgccttttaatgcgcttccggcagcttcacggaacgggccataaaaggaggaggcgaacttggtgctatagctcataatcgccgtatctttaaatcccgcagcgtccagcgcctgacgaatcgcctgtacctggccgtccatcgcggcggaaggggcgatgaagtctgcacctgcagcagctgcaaccacggcttgcttgcctaaattttccagagtcgcgtcgttgtcgacgccatgctcgcacagcacaccgcagtgaccgtgagaagtgtattcacagaagcaggtgtcactcataacgatcatttctggcacggtctgcttgcagatgcggctcatacgcgccaccagtccatcttcccgccaggcatcgctgccggtttcatcggtatggtgagagatgccaaaagtcatcacggaacgaataccggcgttggcgatgcgttcaatttcgcgtgccagatgtttctctggaatgcgcatcacgcctggcatggcttcaacggctttgtagtcgtcaatttcttcttcaacaaagatcggcaacaccaggtcgttaaggctaagtgttgtctcttcaaacatagcgcgcagcgcaggagatttgcgcaggcgacgagggcgttggattaagtctgtcatggtctgcctgatgtttgtggaatcgaggggcatagtatacctgaagcagggtagggatgttttacgaaagttgtcgcgatgttgacaagaagagaatggaagagaggccaggacatctttttaatagaaacagcaataattttatattcactgaaaatatttttaatcttgaatattatcgggcgttaaaatattacattgtggttttcaatgcgttatccgcagcgtgacgctccagcgccagttcaatcaaacgtgtgatcagatcggtgtaacccagaccgctggcttgccacagcttcggatacatactgatattagtgaagccaggcagggtgttgatctcgttgatcaccacttcgttctctggggttaaaaacacgtctacacgcgccatgcctgcgcatcccaacgtttgataagcctgaacggcaatcgcccggatcttatcgttgatttctggcgcaatggctgccggaactaccactttcgcgccatcttcgtcaatgtacttggtgtcgtaggcatagaaatcgctggtgagtacgatctctccacaggtgctggcttgcggattgtcgttgcccagaactgcgcattcgatctcacgacctttgatcccttgctcaacgatcactttatgatcgaactcgaacgccagatcgacggcaattgcgtactgttcttcactggttactttgctgacaccaacagaagagccctgattagccggttttacaaacagtggtaaccccagtttagactccacttcggcaaaactaatgttgtgacgattggcgcgcgtcagggtaataaatggcgcaatgttcagcccggcatcgcgtagcagacgtttggtgacatctttgtccatacaggctgcactagccagaacatcagaacctacaaacggtaaattggcgacccgcagcattccctgcaaggaaccatcttcgcccagcgtaccgtggacaatcgggaaaatgacatccaccgtcggcaacggctgaccgttttgcgcgtcgataagctgatgctcatgtttacctggcacctgcgcaaggctggtcgcgctagggcgcaacgcaatatgggcaggatcgtctgcatttagcagataattgctggcatcgctgacgtgccattgcccttgtttatcaatgcccagcagcacaacgtcgaagcgacttttatcaatggcatcgacaatgttttttgcgctttgcagagacacttcatgttccgcacttttaccaccaaaaacgattcctacccgcagtttttccatcttaaaaacctatcccgtctaacacaaagtgcatacattaccacgacaaaacgggggattcgcggccttctgaaagattgttgcaatcttctgctgacaaagcgtgcaacgtactggtgaagaaagtgcgttatctcaaagatgtgcgcaagatcacaaaaatgatgaacgggaagctaatttattcctggcttaaatggccatgcggtgagtttttttctcttaattataagttaacgaagagaatatatttcataacttttatttataataaaggttgataattaaaagcctatattttgtgtgggtaattatttaaataagagaaacgtttcgctggtaatcaaacaaaaaatatttgcgcaaagtatttcctttgtcataaaaataatacttccagacactatgaagttgtgaaacataatgttaacttctccatactttggataaggaaatacagacatgaaaaatctcattgctgagttgttatttaagcttgcccaaaaagaagaagagagcaaagaactgtgtgcgcaggtagaagctttggagattatcgtcactgcaatgcttcgcaatatggcgcaaaatgaccaacagcggttgattgatcaggtagagggggcgctgtacgaggtaaagcccgatgccagcattcctgacgacgatacggagctgctgcgcgattacgtaaagaagttattgaagcatcctcgtcagtaaaaagttaatcttttcaacagctgtcataaagttgtcacggccgagacttatagtcgctttgtttttattttttaatgtatttgtacatggagaaaataaagtgaaacaaagcactattgcactggcactcttaccgttactgtttacccctgtgacaaaagcccggacaccagaaatgcctgttctggaaaaccgggctgctcagggcgatattactgcacccggcggtgctcgccgtttaacgggtgatcagactgccgctctgcgtgattctcttagcgataaacctgcaaaaaatattattttgctgattggcgatgggatgggggacagcgaaattactgccgcacgtaattatgccgaaggtgcgggcggcttttttaaaggtatagatgccttaccgcttaccgggcaatacactcactatgcgctgaataaaaaaaccggcaaaccggactacgtcaccgacagcgctgcaagtgcaaccgcctggagtaccggtgtcaaaacctataacggcgcgctgggcgtcgatattcacgaaaaagatcacccaacgattctggaaatggcaaaagccgcaggtctggcgaccggtaacgtttctaccgcagagttgcaggatgccacgcccgctgcgctggtggcacatgtgaccagccgcaaatgctacggtccgagcgcgaccagtgaaaaatgtccgggtaacgctctggaaaaaggcggaaaaggaagcattaccgaacagctgcttaacgctcgtgccgacgttacgcttggcggcggcgcaaaaacctttgctgaaacggcaaccgctggtgaatggcagggaaaaacgctgcgtgaacaggcacaggcgcgtggttatcagttggtgagcgatgctgccagtctgaatagcgtgacggaagcgaatcagcaaaaacccctgcttggcctgtttgctgacggcaatatgccagtgcgctggctaggaccgaaagcaacgtaccatggcaatatcgataagcccgcagtcacctgtacgccaaatccgcaacgtaatgacagtgtaccaaccctggcgcagatgaccgacaaagccattgaattgttgagtaaaaatgagaaaggctttttcctgcaagttgaaggtgcgagtatcgataaacaggatcatgctgcgaatccttgtgggcaaattggcgagacggtcgatctcgatgaagccgtacaacgggcgctggaattcgctaaaaaggagggtaacacgctggtcatagtcaccgctgatcacgcccacgccagccagattgttgcgccggataccaaagctccgggcctcacccaggcgctaaataccaaagatggcgcagtgatggtgatgagttacgggaactccgaagaggatagtcaagaacataccggcagtcagttgcgtattgcggcgtatggcccgcatgccgccaatgttgttggactgaccgaccagaccgatctcttctacaccatgaaagccgctctggggctgaaataaaaccgcgcccggcagtgaattttcgctgccgggtggtttttttgctgttagcaaccagacttaatggcagatcacgggcgcatacgctcatggttaaaacatgaagagggatggtgctatgaaaataacattactggttaccttgcttttcggtctggtttttttaaccaccgtcggcgctgccgagagaactttaaccccacaacaacagcgtatgacctcctgtaatcagcaggcgacggcgcaggcgttgaaaggggatgctcgtaagacctacatgagtgattgcctgaagaacagcaagtctgcgcctggcgaaaaaagtttgacgccacagcagcaaaagatgcgcgaatgcaataatcaagcaacacaacaatctctgaaaggtgatgatcgtaataagtttatgagtgcctgcctcaagaaagccgcctgatacctgatagtgctaacgggtgagctacgaaaatggctcacccgaaatatcatacttctgcctttagctccgtctctataatttgggaaaattgtttctgaatgttcccaaaaataatgaatgatgaaaactttttcaaaaaagcggcggcgcacggggaggaacctcctttaactcctcaaaacgaacatcagcggtccgggctgcgcttcgcccgtcgcgtcagactaccccgtgcggttggcctggctggcatgttcttaccgattgctagtacgctggttagtcacccgccgccgggctggtggtggctggtgttggtcggctgggcgttcgtctggccgcatttagcctggcagatagcgagcagggccgtcgatccgcttagccgggaaatttacaacttaaaaaccgatgcagtattagcgggaatgtgggtaggcgtaatgggcgtaaacgtgctgccttccaccgcgatgttgatgattatgtgtctgaatttgatgggggcaggcggcccccgtctgtttgtcgcgggtctggtgttgatggtggtttcctgccttgtcaccctcgagctgacgggcattaccgtgagcttcaatagtgcgccgctggaatggtggctctcccttcccattattgtcatttatcctctgctgtttggctgggtcagctaccagacggcaaccaaactggcggaacataaacgcaggttgcaggtcatgagtacccgcgacggcatgacgggcgtgtataaccgacgtcattgggaaactatgttacgcaatgaatttgataactgtcggcggcataatcgcgatgcaacgttactgattatcgatatcgaccatttcaagagcatcaacgatacctggggccatgatgtgggcgatgaagcgattgtggcgcttacccgacagttacaaattgccctgcgcggtagcgatgtgattggtcggtttggcggcgatgagtttgcagtaatcatgtccggtacgccagctgagagcgccattaccgccatgttacgggtgcatgaagggctaaatacattacgtttgccgaatacgccacaggtaactttacggattagtgtgggggttgcgccgctgaacccacaaatgagtcactatcgtgagtggttgaaaagcgcagatttggcgctttacaaagcaaagaaagccggacgtaaccgcaccgaagtggcggcctgacgtccggcgaaagtcatcaggatttgctgagtttttcacttttttccatacacttcgtcatcgcttcgatcactgcagcacggaagcctttctcttccagtacgcgtaccgcttcaatggtggtgcctcccggactgcagaccatatctttcagtgcccccggatgttctcccgtttccagcaccatttttgcggaacccattaccgcctgagcggcaaatttatacgcctgggcgcgtggcatcccgcccagcacggcggcgtcggccatcgcttcgataaacataaatacgtaggctgggctagaaccgctcacaccgaccaccgggtggatcatcggctcagcaattacttccgcttcgccaaagcagcggaaaatattcagcacatcagcggtatcttctggggttaccagcgcgtttggcgttacggaggtcatcccggcattaaccagtgcgggagtgttcggcatggcgcggataattttccggtcatggcccagcgcgcgggcaagctggtcgagcgtgacacctgcagcaatagaaacgaccagagagtctttattcaggctggaggtgatttcgctaagcactttaatcatgatgccaggtttaacggcagcaaaaatgatgtcggcgatttgcgccacttcttgcgcgctttctgcggcgttgatgccgaactggtcatgcagggcggcgactttatccggggagggggtgtatacccagatttgccctggaagcacctgaccgctggcaatcagaccgccgagaatggcttttcccatattgccgcagccaataaaaccgattttcttttccattgcctcactcctgccgtgaaattcattgttttgataatcgctggcagaagcataaacagaactatgccggaaggcaaaagcgcgacacaatagaggattacccaacaaaggatgactttatgacaatttgggtggatgccgacgcgtgtcccaatgtaattaaagagattttgtatcgcgcggcggaacgtatgcagatgccgctggtactggtagcaaaccagagtttacgcgtgccgccaagccgatttattcgtacgctgcgcgtcgcggcaggtttcgacgttgccgataacgaaattgtccggcagtgtgaagcgggcgatttggtgatcaccgcagatatacctttggctgctgaagccatcgagaaaggcgctgcggcgcttaatccgcgcggcgaacgttacacgccagcgaccattcgtgagcgcctgacgatgcgcgattttatggataccttacgtgccagtgggatccagaccggcggaccagatagccttagtcaacgtgaccgccaggcctttgccgcggagctggagaagtggtggctggaagtgcaacgtagtcgtggctaaatgtaatttattatttacacttcattcttgaatatttattggtatagtaaggggtgtattgagattttcactttaagtggaattttttctttacaatcgaaattgtactagtttgatggtatgatcgctattctcatgacaccggctttcgccgcattgcgacctattggggaaaacccacgatgacacaacctctttttctgatcgggcctcggggctgtggtaaaacaacggtcggaatggcccttgccgatagccttaaccgtcggtttgtcgataccgatcagtggttgcaaagtcagctcaatatgacggtcgcggagatcgtcgaaagggaagagtgggcgggatttcgcgccagagaaacggcggcgctggaagcggtaactgcgccatccaccgttatcgctacaggcggcggcattattctgacggaatttaatcgtcacttcatgcaaaataacgggatcgtggtttatttgtgtgcgccagtaagtgtcctggttaaccgactgcaagctgcaccggaagaagatttacggccaaccttaacgggaaaaccgctgagcgaagaagttcaggaagtgctggaagaacgcgatgcgctatatcgcgaagttgcgcatattatcatcgacgcaacaaacgaacccagccaggtgatttctgaaattcgcagcgccctggcacagacgatcaattgttgattttcgagcgcctatacttaacgttcatcccgtgaaataaggaagaacgatgccaacgaaaccgccttatcctcgtgaagcatatatagtgacgattgaaaaaggaaagccaggacagacggtaacctggtaccaactcagagccgatcatcctaaaccagacagcttgatcagtgaacatccgaccgctcaggaagcgatggatgcgaaaaaacgctatgaggaccctgacaaagagtgaccgcatcagactgctcggaagggattctgagtgccactacaagggatctgcgtcacatttttcataattcatgtttttctaataattagaatattaaacaataacaatccattactggaatcatttggaatctttacattatgccgtgcacgtctgctgctacgctttttgtcatttgtagcacaagtaagtgtcagcagtggtgcttcacacttgcccggtaattaacgacgaaagaaaagtaaggtggatgaacaatgagtgcgagcttggcgatcctgaccatcggcattgtacctatgcaggaagttttgccgctcctgacggaatacattgacgaagataatatttcccatcatagcctgctggggaagttaagtcgtgaagaagtgatggcggagtacgcgccagaagcaggcgaagacaccattctcacattattaaatgacaaccagctggcccatgttagccgtcgcaaagtggagcgtgacctgcaaggtgtggttgaagtgctcgataatcagggttatgacgtcattttattaatgagtacagcaaacattagtagtatgactgcgcgtaatacgatctttcttgagccgagccgaatattgcctccactggtttcctctattgttgaagatcatcaggtgggggttatcgttccggttgaggagatgctgcccgttcaggcgcaaaaatggcaaattttgcagaaaagcccggtatttagtttgggtaaccccattcatgatagtgaacaaaaaatcattgatgccgggaaagaattactggcaaaaggggctgatgtcatcatgctggattgtttaggatttcaccaacgtcatcgcgatttactgcaaaaacagctcgatgttcctgtcttgctgtctaacgtattgattgcacggctggctgcggaattactggtgtaattttgcgtgacagccagcgcctctggcccctatagtgaagtagatgttcaactaccaaacagggccagtttatgcttcaaagtaatgagtacttttccggcaaagtgaaaagtatcggcttttccagcagcagcactggtcgcgccagcgtgggtgttatggttgaaggcgaatacaccttcagcaccgctgagccggaagagatgacggtaatcagtggcgcgctgaatgtgttactgcctgacgcgaccgactggcaggtgtatgaagccggtagcgtgtttaatgttcccggtcacagtgagtttcatctgcaagttgccgaacccacctcttatctgtgccgctatctgtaattcctcgccttccccttgaacgggagggcatttttctgaaatatcctttctttagcccataataatatttcctttgctgcgattttttcaatttccgatatattcataatttatcaaggttgatataaatatcagtgaagatctccagatattgttgcggaactggctacgataaaagataaatcagatgatgaatggtggcgtgcattgctgcaaagtcgcaatgatcatttacgccaaacggcattgcgcaacgcacataccccggcgttgttgttaacgacattgactgagcctcaggatcggagcctggctattaataatccacagctggctgccgatgtgaaaacggcgtggttaaaagaggatccaagtttactcttatttgtcgaacaacccgatcttagcctgttacgtgatttagtgaaaaccggggcaacgcggaaaattcgcagtgaagcgcgtcaccggcttgaggaaaaacaatgacacaacgtccatggagcaagttacagcgtaaaacgcataatattgctgcgctaaaaattattgctcgccgtagcgaataattatatgcctggtgtggcttcgtacgccggataagacgcggcaggcgtcgcatccggcattaaaggaaaatcagcaattaacgttgtgcttcgccacctaatccttcaatcaggttttgaattaacgctgccagttcaccagtcatcaggatgaaatcggcatcaaaacgctgggcgaaatcttcacggtcgatatcttcgttttgatcgcgcagctcgtcgcagaacttcagacgcttgaggctaccatcgtcgcacatcacaaactgaatgcgctgctgccagtcgagcgccagtttagtcaccacttttccggcttcaatgtgattggtgatctcttcgctggtcagatcttgtttcttcgcgcggatcacgccgccatcttccagcaagcttttcagctcggcttcatcaagcagctggaagccctgtgccgcactgccggagcgaacccattcggtcagcgtcagttcaatcgggttttccatgctcaatggtacaaccggtaagctccccaggcttttacgcagtaatgccagcgtatcttccgcttttttggcactggcgcagtccaccataatcaaaccgttaaccgtgtcgatccacatcattgtctggctaaaacggctgaaagcacgcggcagcagagagtgcagcacttcgtctttcaggctatctttttcggttttcttcagcttacgcgcctgttccgcttccagtttggcgattttcgcttccagcgcctgtttaatcaccggagacgggaggattttttcttctttgcgcgcgcagataacaatttgaccattggcaacgtgcgttaacgcatcgctgtggcttcccatcggaggaacccagcccatcttcgccatgtcctggctgccgcatggggtaaatgccatgctggctagctgtttttccatctcttctgcacgcaggctaatctcgcggctaagacggtaaaccattaaatttttgaaccacagcatgataatttccacggccttgtcgttaaatttagcgggcatgataacgaattgtcggcggccttgcattgccaatccggttgtccgtctctacgctattgatattgaaaaaaataaggagagtaccgtgcgtataggtatcgatttaggcggcaccaaaactgaagtgattgcactgggcgatgcaggggagcagttgtaccgccatcgtctgcccacgccgcgtgatgattaccggcagactattgaaacgatcgccacgttggttgatatggcggagcaggcgacggggcagcgcggaacggtaggtatgggcattcctggcagtattagcccttacaccggtgtggtgaagaatgccaatagtacctggctcaacggtcagccattcgataaagacttaagcgcgaggttgcagcgggaagtgcggctggcaaatgacgctaactgtctggcggttagtgaagcagtagatggcgcggcagcgggagcgcagacggtatttgccgtgattatcggcacgggatgcggcgcgggcgtggcattcaatgggcgggcgcatatcggcggcaatggcacggcaggtgagtggggacacaatccgctaccgtggatggacgaagacgaactgcgttatcgcgaggaagtcccttgttattgcggtaaacaaggttgtattgaaacctttattagcggcacgggattcgcgatggattatcgtcgtttgagcggacatgcgctgaaaggcagtgaaattatccgcctggttgaagaaagcgatccggtagcggaactggcattgcgtcgctacgagctgcggctggcaaaaagcctggcacatgtcgtgaatattctcgatccggatgtgattgtcctggggggcgggatgagcaatgtagaccgtttatatcaaacggttgggcagttgattaaacaatttgtcttcggcggcgaatgtgaaacgccggtgcgtaaggcgaagcacggtgattccagcggcgtacgcggcgctgcgtggttatggccacaagagtaaaaaacgtaggcaattggcgcatcatgcctgatgcgacgcttgccgcgtcttatcaggcctacaaaaggtgccagaaccgtaggccggataaggcgttcacgccgcatccggcaataagtgctccgatgcctgatgcgacgcttgccgcgtcttatcaggcctgcaaaatgtgccagaaccgcgtagggcggataaggcgttcacgccgcatccggcaataagtaatgagcaccgagactataacttaccccagtggtttcgccagcaccggagtatccgccgcttgctggcgcttatagcgaccatacagcagcaagctgctcatcgcagcaaagctaagcagggcggcaggcagcgccacgtaattatatgccagccccagcgtcagcatcatacctccgcaatatgcgccgacggcgctaccgaggttaaacgctatttgcccacctgcggcacctaataactctccgcctttggcgttttgtagtaacaatatttgtagcggtgcactaagggcaaataatcccgcgcaacaaataaaagcaaaaataaggctcgttgttttcatgccgccgcagaaaaagagcatcagcagtgccagtacaattataaagtcagttactgctgcaatgcgcagtggactataacgtccactaatcctgccacttagcatatttcccagcaccatccctagcccaactaacatcataataaaggtcatcgccgtttcgctaaaaccggaaataaacatcatgtatggctttacgtagctgaaccaggcaaacacacctgcgttgccaaacatcgtggcggcgaaaattaaccacggggccgggctgcgcaaaaagtgaaattgttcgcgcagatttcctttcgcctcgtcgcgaatatctggcacccaaaaatagacgcttgccatcaccgcaatattaaaaacagcgatcaataaaaaggtgtaacgccagctaaattcctgacttaaatacgttcccagcggaatgcccagcaaattggcgactgtcatcccggaaaccatccccgccacggcggcggtgacttttccgggtttgataattttacttaacacgatcgctccgacgccaaaaaatgcgccatgcggaaagccggataccagccgaccaatggcgagcatcaggtaagagctagagagcgtgaacatggcgttgccaatgacgcacaacgccaccagaaacaacaagatatgtttgagactgtagcggctggaaaagagtgcgatgattggcgcaccgaccaccacccccagtgcataatagctgatcatatgcccggcggcaggaatgctaattcctacgttatgcgccagctccgtgagcacgcccataatgccaaattcggccatccccaaaccaaacgtgcccagagccaaagataaaatgacttttttcataccaccatcacaaccaccagaacggctaccaatcaccgtagccaataaagtgatagcttgcaggataacgaccagcaaggccaagagataattcgcccctctgtattcattatcctgctgaatagttatttcactgcaaacgtactttccagtttgctgtagcccaggccgttgatctttttcactttgatctgcaccggaatacgctctttcatcgcttctacgtggctaatcacaccgatggttttgccactggcgttcagggcatccagcgcatcaagggcggtatccagcgtttcgctatccagcgtgccaaaaccttcatcaaggaacaggctgtcaatacgtgttttatggctgaccagatcgctaagcgccagcgccagcgccagactaacgaggaaactttcgccgccggaaagggtacgggtatcgcgtaccgcatctgcctgccaggtatcaacaacctcgacttccagcgcctcgctggctttgcgctgtaacagatagcgcccgtgcagccgggtaagttgctgattagcgagatggactaaattatccagcgtcagcccctgggcaaacttgcggaatttatcgccctctttggaacctattaggctattcagatatccccagtcctcaacctgctgcgtcatttgagcaatttgctgcattaaggtttgttgttgctgacggttatctgcatcctgcttcagctgctggcgaatctcgccttgactcgtggtgttttcacgcaacttttggtgagtttgcgctaactcttgctgaatctgctccaccgtcacagtgagagccaacccgtcgtcaggtcggtgttgttgatgctgtgccagcgtttctgctgtctgagtgaccagagtttgcgcctgacggcgctggttttccagattctgcttgagctgttccagctgcgttagtgtttgttcatccattagcgccgcaaggaacgcctgctgatcgtcaaagacgctggcctgtagcgcggtgtcaaactgcgcctgggctttttgcagactttgcgccgccagaacatcctgttgctgtaacgtctgctgctggctgtgtaatgcgagacattgttcatgtacctgccgccagttttccaataccacagtttcttcgcagtgcgggagttcatcactttgcggcaacgtttccagaatcggcgtcagctgctgaatacggttttgcagcgcggttaattcgttctggcgttgctgccagctctgcgcttcttgctgacgtgtcgccaaccagctctcttcttcatcttcctgtggcaatgtcagtgcataacccgtcaatgtcgttaaaagtagttgctggcgttgttcaatttgctgttgatactggataatttgctgattatgcgcggcaatctgcccttgtaattcatgccgttggctgagtaaccgcagctggcgttcgtgctcatcttgtgcatccagccacggttgaatatcgtccagtggctgcaaggtgatattgaggctggccgtgacggcttgccattgttgagtaagtgcttgctcatcttgtcggaggctttgcgcttcgttttcatcacgctgaagctgctttgttatggcgtccagttgcccacgtagcgtcgcaccttcttcaccgagctttttaacttcgttttccagcgccagtaatcgagactgattaacgccaggctccagcgcctgatacgcctcgaccgccgggtggctggtggaaccacaaagtgggcaaggctgacccgcctgtaactgtgcacgttgagcttccagcgttttgatgcgcgcttcctgctcgcaaatggttttcacatcggcaagttgctgcgtcttttctttataacgctggcgcatttcgttaagtgcggcgttacgttgcgtctgttcttgcgtgacattctggatagcgacctgtaactgcgccagacgtttttgttggggaacaatctgtccatgcagcgcgaccaggtgctgacgcagtgggcgttgctcagcatgttgcgccagggcggtagcaacttcatcggcggttaacgtcaacgtgatcgccgcaagcgcattaagtttttgctcagcatgggttaactgttgctgccattgccgcagatgctcgcgatcgctggtttgttgggagaactgcgcacgccaacccgccggttcgttgttccactgacggaagcggtcgtgttcctgtaaccaggtattcaggctttgttgctgctgctgtaattctgcactctgcttcgccgcgtggtggcgaatgctcgcgcgaagcgccattgtgctctgtaagcgagtatttacttcttcaatctgctggcgaatatgcgccagcgccgcgctgtgttctgcgatgcgttcccagtgtggacgaagatttcgtgccggttgtgccagactaagcgccgccagttgaggttgcgctttttcttcttcggctaacgcctgttgcaaggcctgctgacggcggctggcttcttgctgcaattcgtcctgacgcgttaaccagtttaggctttgttgttcttgctgctgcgcggtaattaactgtttttcttcgtcagtaagtacctgcaaactcgctgtcaggctttgcacttgttccggcgtgagcaacgtgacgccgctggcctgcgcttgcagcttctccagctctgtgcgggcgcttttgtgctgctcaaaaaccatcgcgctgatttgcccgtagatttcagtgccggttaactcctcgagcaattccgcgcgttctttgggtttggcattcaggaaggcagcaaattgcccctggctaagcagcatgctacgggtgaagcgcccgtaatccagcccggttaacgtcgctgtcagttccagcttatctttcactttgtcggcgagaattttgccgtcggcgcagcgcgccagctctacgcgtggcacctgcaaattaccgtcgggttggttacgcgcccgattctggctccagaatgcacggtacgcttcacctttcacttcaaactccacctccgccagacattcggcggtatcgcgggtcatgagatcattttggctttgactaacgttagagagacgcggagtttcgtgatacagcgccagacaaatggcgtccagcagggtggttttccccgcacctgttgggccggtaatagcaaacagcccgttgctggcgaacggctcgcgggtgaaatcaatcttccattcgccttttaaactgttcaggtttttcaggcgcaggctgagaattttcatgcttcgtgttctccggcgagggtatgcaacgtcgtggtgaaaagatgctgcagacgttgctgctggctttcatccagttcttccagtgccagacggcgattgaacacctcttcgacgctgagttcgctgagggtttcacgctgttggctggctaacacacgctcgcgctgttcacgactccgacgtaccagcaatacttcgacaggcaaactttcggttaatgcctggattttgcgctgaatatcatgcagatactcatcagtagtgatttcgatatccagccagacaggtggctcctggcttacatcgcgccactgttccagctgtgcggtaatgctcgccagatcgcctttcagcactgccatgggttgcgttaccggtacgttcaggttttccacgctctctaatttgccgttactaaatgtcaccagatggacatatttactcttaccgcattcatcaaaactcagtggaatgggggagccgcaatagcgaacatgttccatgccgccaataatctgtgcgcggtgaatatgcccgagcgcgatgtagtcggctggtggaaagttttgtgccggaaacgcgtccagcgtgccaatataaatgtcacgcacggcgtcacttttactggcccccacggtcgttaaatgtcccgtggcgatgatgggcagaggctgatcgccgcgcagtttgcaggcatcggcatagtgttgttggtaataatcggtaatcgctgccagtaaatgctgctgtttttcaataccgttaagccccgcctggctggtaataatgtcacgcggacgtaaaaacggaatggggcacagcactgcgcctggcgtcccgtcgcgacgaggcaagatttgcggcgcatgtccggcgctggcgaccacggtagtattgaggaacgccatgatatcgcggctttcattcagcgtggcgacgctgtcatggtttcctgccagtaccaccagatgacagccagtttgctgtaaattgacaacaaaacggttgtataacgtgcgggcgtaactgggcgggctgccggtatcgaaagcatcaccggcaacaataatcgcatccacctgatgggtttgtgctgtctccagcagccagtcaagaaaagcctgatgttcagcttcgcggcttttactgtagaagttctggccgagatgccagtcactggtgtgaaggatgcgcataacggttccctggcgaaaaagcatgggcgcgattatacccaaacagatgtgccatttgcttttttctgcgccacggaaatcaataacctgaagatatgtgcgacgagcttttcataaatctgtcataaatctgacgcataatgacgtcgcattaatgatcgcaacctatttattacaacagggcaaatcatggcgagacgtattctggtcgtagaagatgaagctccaattcgcgaaatggtctgcttcgtgctcgaacaaaatggctttcagccggtcgaagcggaagattatgacagtgctgtgaatcaactgaatgaaccctggccggatttaattctcctcgactggatgttacctggcggctccggtatccagttcatcaaacacctcaagcgcgagagcatgacccgggatattccagtggtgatgttgaccgccagaggggaagaagaagatcgcgtgcgcggccttgaaaccggcgcggatgactatatcaccaagccgtttagcccgaaggagctggtggcgcgaatcaaagcggtaatgcgccgtattagcccaatggcggtggaagaggtgattgagatgcagggattaagtctcgacccgacatctcaccgagtgatggcgggcgaagagccgctggagatggggccgacagaatttaaactgctgcacttttttatgacgcatcctgagcgcgtgtacagccgcgagcagctgttaaaccacgtctggggaactaacgtgtatgtggaagaccgcacggtcgatgtccacattcgtcgcctgcgtaaagcactggagcccggcgggcatgaccgcatggtgcagaccgtgcgcggtacaggatatcgttttagtacccgcttttaacgccttgctcatcggacgcagagcagggcttatgatttcttaactggagtatcttacgtgctggaacggctgagctggaaaaggctggtgctggagctgctactttgctgcctcccggctttcatcctgggtgcattttttggttacctgccctggtttttgctggcaagcgtaacaggactgcttatctggcatttctggaatttattgcgccttagttggtggctgtgggtggatcgcagtatgaccccgccaccggggcgtggtagctgggaaccgctactatacggcttacaccagatgcagctgcgaaataaaaaacgccgccgtgaactgggcaatctgattaaacgctttcgtagcggcgcggagagcctgcccgacgcggtggtgctgaccacggaagagggcggtattttctggtgtaacggtctggcgcaacaaattcttggtttgcgctggccggaagataacgggcagaacatccttaacctactgcgttacccggagtttacgcaatatctgaaaacgcgtgatttttctcgcccgctcaatctggtgctcaacaccgggcggcatctggaaattcgcgtcatgccttatacccacaaacagttgctgatggtggcgcgtgatgtcacgcaaatgcatcaactggaaggggcgcggcgtaacttttttgccaacgtgagccatgagttacgtacgccattgaccgtgttacagggttacctggagatgatgaatgagcagccgctggaaggcgcggtacgcgaaaaagcgttgcacaccatgcgcgagcagacccagcggatggaaggactggtgaagcaattgctgacgctgagcaaaatagaagccgcaccgacgcatttgctcaatgaaaaggttgatgtgccgatgatgctgcgcgttgttgagcgcgaggctcagactctgagtcagaaaaaacagacatttacctttgagatagataacggcctcaaggtgtctggcaacgaagatcagctacgcagtgcgattagcaacctggtctataacgccgtgaatcatacgccggaaggcacgcatatcaccgtacgctggcagcgagtgccgcacggtgccgaatttagcgttgaagataacggaccgggcattgcaccggagcatattccgcgcctgaccgagcgtttttatcgcgttgataaagcgcgttcccggcaaaccggcggtagcggattagggttagcgatcgtgaaacatgctgtgaatcatcacgaaagtcgcctgaatattgagagtacagtaggaaaaggaacacgtttcagttttgttatcccggaacgtttaattgccaaaaacagcgattaatccgcctttgtcatcttttattgccataagccagtcgatgctggcttattttctttgcagtcaaaatacgggcgttagattttacaacgattggtgattttttgttcgcatgattagccatgtctttttcacggaaatagtgttttatactggttggtgatttcttatcgctatatacctctggtttttagatccctccttgctttaaaacgttataagcgtttaaattgcgcttcaggtgctgtcatactgactgcattaacgcggtaaatcgaaaaactattcttcgccgcgcctggttgggagtatttcccgctaaaattgtttaaatataccgctgtatcatccccagggattggcacaaaaatttaacgttacaacaccacatccacaggcagtatgatttatgacccatcaattaagaagccgcgatatcatcgctctgggctttatgacatttgcgttgttcgtcggcgcaggtaacattattttccctccaatggtcggcttacaggcaggcgaacacgtctggactgcggcattcggcttcctcattactgccgttggcctgccggtattaacggtagtggcgctggcaaaagttggcggcggtgttgacagcctcagcacgccaatcggtaaagtcgctggcgtactgctggcaacggtttgttacctggcggtggggccgcttttcgctacgccgcgtacagctaccgtttcctttgaagtggggattgcgccgctgacgggtgattccgcgctgccgctgtttatctacagcctggtctatttcgctatcgttattctggttagcctctatccgggcaagctgctggataccgtgggcaacttccttgcgccgctgaaaattatcgcgctggtcatcctgtctgttgccgctattgtctggccggcgggttctatcagcacggcgactgaggcttatcaaaacgctgcgttttctaacggcttcgttaacggctatctgaccatggatacgctgggcgcaatggtgtttggtatcgttattgttaacgcggcgcgttctcgtggcgttaccgaagcgcgtctgctgacccgttataccgtctgggctggcctgatggcgggtgttggtctgactctgctgtacctggcgctgttccgtctggggagtgacagcgcgagcctggtcgatcagtctgcaaacggcgctgctattctgcatgcttacgttcagcacacctttggcggcggcggtagcttcctgctggcggcgttaatcttcatcgcctgcctggtaacggcagttggcctgacctgtgcttgtgcagaattctttgcccagtacgtaccgctctcttatcgtacgctggtgtttatcctcggcggcttcagcatggtggtttctaacctcggcttaagccagctgatccagatctccgtaccggtgctgaccgctatttatccgccgtgtatcgcactggttgtattaagttttacacgcagttggtggcataatagctcccgcgtgattgctccgccgatgtttatcagcctgctttttggtattctcgacgggatcaaagcatctgcattcagcgatatcttaccgtcctgggcgcagcgtttaccgctggccgaacaaggtctggcgtggttaatgccaacagtggtgatggtggttctggccattatctgggatcgcgcggcaggtcgtcaggtgacctccagcgctcactaaatcactgaacatttgttttaaccacggggctgcgatgccccgtggttttttattgtgttgatgggttaggaattgatggaaagtaagaacaagctaaagcgtgggctaagtacccgccacatacgctttatggcactgggtagtgcaattggcaccgggctgttttacggtagcgcagacgccatcaaaatggccggtccgagcgtgttgttggcctatattatcggtggtatcgcggcgtatatcattatgcgtgcgctgggggaaatgagcgtacataacccggccgccagctctttcagccgttatgcgcaggaaaacctcggcccgctggcaggttacattaccggctggacctactgctttgaaatccttattgtcgccatcgccgatgtgaccgcttttggtatctatatgggtgtctggttcccgacggtgccgcactggatttgggtactgagcgtggtgctgatcatttgcgccgtaaacctgatgagcgtgaaggtattcggtgagctggaattctggttcagcttctttaaagtcgccaccatcatcatcatgattgtcgccggtttcggcatcatcatctgggggattggcagcggcgggcaaccgaccggtattcataacctgtggagcaacggcggcttcttcagtaacggctggcttggcatggtaatgagcttgcaaatggtgatgtttgcttacggtgggatcgaaattatcgggattaccgccggtgaagcgaaagatcctgagaaaagcataccgcgtgcgattaactccgtgccgatgcgtattctggtgttctacgtcggtacgctgttcgtcattatgtctatctacccgtggaatcaggttggcactgccggtagcccgttcgtgctgacgttccagcatatgggcattacctttgccgccagcattcttaactttgttgtgctgactgctagcctgagcgcaattaacagtgatgtatttggcgtaggccgtatgctccacggtatggcagagcagggcagcgcgccgaaaattttcagcaaaacgagccgtcgcggtattccgtgggttacggtgctggtgatgactaccgcgctgctgtttgcggtgtatctgaactacatcatgccggaaaacgtcttcctggtgatcgctagcctggcaaccttcgccacggtgtgggtgtggattatgatcctgctgagccaaattgccttccgtcgccgtttgccgccagaagaagttaaggcgctgaaatttaaagtgccgggtggggtagcaacgaccatcggcgggctgattttcctgctctttattatcgggttgattggttatcacccggatacgcgtatcagcctgtatgtcggtttcgcgtggattgttgtgctgttgattggctggatgtttaaacgccgccacgatcgtcagctggctgaaaaccagtaatccttgcgttctgtaagccggttcaggaggaaatcctgatccggctattccgaaagttatccgcccccgtcctcctcccccaaatatccttcagatgatgagtgatcctgcattaggctatggcaaggtgatcagattttcatcacaggggaattatgatgttaaatgcatggcacctgccggtgcccccatttgttaaacaaagcaaagatcaactgctcattacactgtggctgacgggcgaagacccaccgcagcgcattatgctgcgtacagaacacgataacgaagaaatgagtgtaccgatgcataagcagcgcagtcagccgcagcctggcgtcaccgcatggcgtgcggcgattgatctctccagcggacaaccccggcggcgttacagtttcaaactgctgtggcacgatcgccagcgttggtttacaccgcagggcttcagccgaatgccgccggcacgactggagcagtttgccgtcgatgtaccggatatcggcccacaatgggctgcggatcagattttttatcagatcttccctgatcgttttgcgcgtagtcttcctcgtgaagctgaacaggatcatgtctattaccatcatgcagccggacaagagatcatcttgcgtgactgggatgaaccggtcacggcgcaggcgggcggaagtacgttctatggcggcgatctggacgggataagcgaaaaactgccgtatctgaaaaagcttggcgtgacagcgctgtatctcaatccggtgtttaaagctcccagcgtacataaatacgataccgaggattatcgccatgtcgatccgcagtttggcggtgatggggcgttgctgcgtttgcgacacaatacgcagcagctgggaatgcggctggtgctggacggcgtgtttaaccacagtggcgattcccatgcctggtttgacaggcataatcgtggcacgggtggtgcttgtcacaaccccgaaagcccctggcgcgactggtacagctttagtgatgatggcacggcgctcgactggcttggctatgccagcttgccgaagctggattatcagagcgaaagtctggtgaatgaaatttatcgcggggaagacagtattgtccgccactggctgaaagcgccgtggaatatggacggctggcggctggatgtggtgcatatgctgggggaggcgggtggggcgcgcaataatatgcagcacgttgccgggatcaccgaagcggcgaaagaaacccagccggaagcgtatattgtcggcgaacattttggcgatgcacggcaatggttacaggccgatgtggaagatgccgccatgaactatcgtggcttcacattcccgttgtggggatttcttgccaataccgatatctcttacgatccgcagcaaattgatgcccaaacctgtatggcctggatggataattaccgcgcagggctttctcatcaacaacaattacgtatgtttaatcagctcgacagccacgatactgcgcgatttaaaacgctgctcggtcgggatattgcgcgcctgccgctggcggtggtctggctgttcacctggcctggtgtaccgtgcatttattacggtgatgaagtaggactggatggcaaaaacgatccgttttgccgtaaaccgttcccctggcaggtggaaaagcaggatacggcgttattcgcgctgtaccagcgaatgattgcgctgcgtaagaaaagtcaggcgctacgtcatggcggctgtcaggtgctgtatgcggaagataacgtggtggtatttgtccgcgtgctgaatcagcaacgtgtactggtggcaatcaaccgtggcgaggcctgtgaagtggtgctacccgcgagtccgtttctcaatgccgtgcaatggcaatgcaaagaagggcatgggcaactgactgacgggattctggctttgcctgccattagcgctacggtatggatgaactaacgttttataacgccttgcgactcgcctgcgccatcatccgcggataaaactgccagaagcgggtttcgagggcgtcataatgagcgtctaaatcgtaccaggagtcacgcagggcatccagacgtgggcggcggcttgccatgccgtttaacacgttctggatgaaatccatatcgcgatagcgcaccagccactgctcactccacaagtaattgttcagattgataaaacgtggcggactgtccggcaaaatcgtcatcacttgctcgcgggcataacagacaaattcctgtagcggaaagtccgggctcagctggctccagtggcgggaaagaaagtgatcccacatgacatccagcgtaataggcgcaacgcggcgcgtttcactacgaaaccactcccgtgcttcgcggacttccggcagattgtcagtcaatacgtcgatacgtcgatgcatatgaatgccagccacgacgtcgggcggaaaactttcttcaggatttccgcgtacgaaatcagccagtaaattgccggaaaggctgctttccgcgagatgggctaaatgcaggtgagctaaaaaattcatcgattatattctatccaaaagggggtaaaggttgcagggagagcgccccggcactagactacccgcctcttattttagtctgagtcagtgtcatgcgcgttaccgatttctcctttgaattgcccgaatccctgattgcccactatcccatgcctgaacgcagtagctgtcgtttactgagcctggacgggccgacgggcgcgctgacgcacggtactttcaccgatttacttgataagctcaaccccggcgatcttctggtttttaataatacccgcgtgatcccggcgcgcctgtttgggcgtaaagccagcggcggcaagattgaagtgctggttgaacggatgctcgacgacaaacgcattcttgcgcatattcgcgccagcaaagcgccaaaacctggcgcagaactgctgctgggcgatgacgaaagtattaacgcaacaatgaccgcgcgccacggcgcactgtttgaagtcgaatttaatgatgaacgcagcgtgctggatattctcaacagcatcggccatatgccgctgccgccgtatatcgaccgtccggacgaagacgctgaccgcgaactttatcaaaccgtttatagcgaaaaaccgggcgcggttgcagccccgaccgcaggtctgcattttgacgagcctttgctggaaaaattgcgcgccaaaggcgtggagatggcgtttgtgacgttgcacgttggtgcgggcaccttccagccggtgcgcgtcgacaccattgaagatcacatcatgcacagcgaatacgctgaagtaccgcaggatgtggtagacgcggtactggcggcgaaagcgcgcggtaaccgggtgattgcggttggcaccactagtgtacgtagcctggaaagcgcggctcaggcagcgaaaaacgatctcattgaaccgttcttcgacgatacccaaatctttatctatccgggcttccagtacaaagtggtcgatgcgctggtgacgaacttccacttgccagagagcacgctgattatgctggttagcgcctttgccggttatcaacacaccatgaacgcctataaagcagcggtagaagagaaatatcgcttttttagttacggtgatgcgatgtttatcacgtacaatccgcaggcaattaatgagcgcgtcggggagtaattccgcggcgctggtttaaaacgttggactgtttttctgacgtagtggagaaaaaatgaaatttgaactggacaccaccgacggtcgcgcacgccgtggccgcctggtctttgatcgtggcgtagtggaaacgccttgttttatgcctgttggcacctacggcaccgtaaaagggatgacgccggaagaagttgaagccactggcgcgcaaattatcctcggcaacaccttccacctgtggctgcgcccgggccaggaaatcatgaaactgcacggcgatctgcacgattttatgcagtggaaggggccgatcctcaccgactccggcggcttccaggtcttcagccttggcgatattcgtaaaatcaccgaacagggcgtgcacttccgtaacccgatcaacggcgatccgattttcctcgatcctgaaaaaagtatggagattcagtacgatcttggtagcgatatcgtcatgatctttgatgagtgtacgccgtatcctgctgactgggattacgcaaaacgctccatggagatgtctctgcgttgggcgaagcgtagccgtgagcgttttgacagtctcggaaacaaaaatgcgctgtttggtatcatccagggcagcgtttacgaagatttacgtgatatttctgttaaaggtctggtagatatcggttttgatggctacgctgtcggcggtctggctgtgggtgagccgaaagcagatatgcaccgcattctggagcatgtatgcccgcaaattccggcagacaaaccgcgttacctgatgggcgttggtaaaccagaagacctggttgaaggcgtacgtcgtggtatcgatatgtttgactgcgtaatgccaacccgcaacgcccgaaatggtcatttgttcgtgaccgatggcgtggtgaaaatccgcaatgcgaagtataagagcgatactggcccactcgatcctgagtgtgattgctacacctgtcgcaattatagtcgcgcttacttgcatcatcttgaccgttgcaacgaaatattaggcgcgcgactcaacaccattcataaccttcgttactaccagcgtttgatggcgggtttacgcaaggctattgaagagggtaaattagagagcttcgtaactgatttttaccagcgtcaggggcgagaagtaccacctttgaacgttgattaatattaataatgagggaaatttaatgagcttttttatttctgatgcggtagcggcaacgggtgcaccggcgcaaggtagcccgatgtctttgattttgatgctggtggtattcggtctgattttctatttcatgatcctgcgtccacagcagaagcgcaccaaagaacacaaaaagctgatggactccattgccaaaggtgatgaagttctgacgaacggtggcctggttggtcgcgtaaccaaagtagcggaaaacggctacattgctatcgcgctgaatgacaccactgaagtagttattaaacgtgacttcgtagctgccgtcctgccgaaaggcaccatgaaggcgctgtaattaaaatttttccctaagggaattgccgtgttaaaccgttatcctttgtggaagtacgtcatgctgatcgtggtgattgtcatcggtctgctgtatgcgcttcccaacctgtttggtgaggatccggctgttcagatcactggtgcgcgcggagtcgccgccagtgagcaaacgctgatccaggtccagaaaacgttacaagaagaaaaaataactgctaagtctgtggcactggaagagggcgctattcttgcgcgcttcgactccactgacacccagttgcgcgctcgtgaagcattaatgggcgttatgggtgacaaatacgtcgtggcgcttaaccttgccccggcaacgccgcgctggctggcagctattcacgctgagccgatgaagctcggccttgacctgcgtggcggcgttcacttcctgatggaagtggatatggacaccgcgcttggcaaactccaggaacaaaatatcgatagcctacgcagtgacctgcgcgaaaagggcatcccgtataccactgttcgtaaagaaaacaactacggcctgagcatcactttccgcgatgctaaagctcgtgatgaagccattgcgtatctgagcaagcgccatccggacctggtgattagcagccagggcagcaaccagctgcgtgcggtaatgagcgatgctcgtctgagtgaagcgcgtgaatatgcggtgcagcagaacattaatatcctgcgtaaccgtgtaaaccaacttggcgtggcggagccggtggttcagcgtcagggtgctgaccgtatcgttgttgaactgccaggtattcaggacactgcgcgtgcgaaagagattctgggtgcgacggcaacgctggaattccgtctggtaaacaccaacgttgaccaggccgctgcggcatccggtcgcgtaccgggcgactctgaagtgaaacagacccgcgaaggtcagccagttgtgctgtacaaacgcgtaattctgaccggtgaccatatcaccgactccacttccagccaggacgaatacaaccaaccgcaggttaacatcagcctcgatagcgctggtggtaacatcatgtctaacttcactaaggacaacatcggcaaaccgatggcaaccctgtttgtggagtacaaagacagcggtaagaaagatgcaaatggtcgtgcggttctggtgaaacaggaagaggtgattaacatcgccaacatccagtctcgtctgggtaacagcttccgtatcaccggcatcaacaacccgaacgaagcccgtcagctgagtctgctgctgcgtgccggtgcgttgatcgcgccgattcagattgttgaagaacgtaccattggcccaaccctgggtatgcagaacattgaacaggggctggaggcttgccttgccggtctgctggtttctattctgttcatgatcatcttctataagaagtttggtctgattgcgaccagtgctctgattgccaacttgatcttaatcgtcggcattatgagcctgttgccaggcgcaacgctgagtatgccaggtatcgcgggtatcgtcttaacccttgcggtggcggtcgatgcgaacgtactgatcaacgaacgtattaaagaagagttgagcaacggacgtactgttcaacaggcaattgatgaaggttatcgtggcgcattcagttctatcttcgatgcgaacatcaccacgctgattaaagtcatcatcctgtacgcagtgggtaccggggcaattaaagggttcgcgattactaccggtatcggtgtggcgacgagcatgtttaccgcgattgtcggtacgcgtgccatcgtaaacctgctatatggcggcaagcgcgtcaagaagctgagtatctgaggagtgcgatgtggcacaggaatatactgttgaacaactaaaccacggccgtaaagtctatgactttatgcgctgggactactgggctttcggcatctctggtctgctgttaatcgctgctatcgttattatgggcgtgcgcggctttaactgggggctggatttcaccggtggtacggttattgaaattacgctcgaaaaaccggctgaaattgacgtaatgcgtgatgcattgcaaaaagccggttttgaagagccgatgctgcaaaactttggtagcagccatgacatcatggtccgtatgccgcctgctgaaggcgaaaccggcggtcaggtgttgggcagccaggttctgaaggtgattaacgaatccaccaatcagaatgcagcagtgaagcgtattgagttcgtcggtccgagcgtgggggcagaccttgcgcaaaccggtgcgatggcgttgatggcagcgctgctgtctatcctcgtgtacgtaggtttccgctttgagtggcgactggcggcaggggtggttattgcgctggcgcacgacgttatcattacgctgggtattttgagcttattccatatcgagattgacctgaccattgtggcaagcttgatgagcgttatcggttacagccttaacgacagtatcgtggtaagcgaccgtattcgtgaaaacttccgcaagatccgtcgcggtacgccttacgaaatctttaacgtgtccttgacccagacgctgcaccgtaccttgatcacatccggtactaccttgatggttatcctgatgctgtacctcttcggtggtccggtactggaaggcttcagcctgaccatgcttatcggtgtttccatcggtactgcatcttccatctatgtggcatctgcgttggctctgaaactgggtatgaagcgcgaacacatgttgcagcagaaagtggaaaaagaaggggcggatcagccgagtattctgccgtaatcaagttcccgttgatgttgaaaatcccggtcagaagatcgggattttttttgatgtatggagattgcgaaaatccccgcatcttgggaaactgcgcgtaaccctacatttcatccaggtaacttttcatggctatcatcccaaaaaactatgcgcggttagaaagcggctatcgcgaaaaagcattaaaaatctatccgtgggtctgcggtcgctgttcccgcgagtttgtttattccaacctgcgtgaacttaccgttcaccacattgatcacgaccataccaataacccggaagatggcagtaactgggaattgttgtgtctctattgccacgatcatgagcatagcaaatataccgaagcggatcagtatggtacgaccgttatcgcaggggaagatgcgcagaaagatgtcggtgaagcgaagtacaacccattcgctgacctgaaagcgatgatgaacaagaagaagtgattaaaacgtaaaattgcctgatgcgctacgcttatcaggcctacgttatttcagcaatatattgaatttacgtgcttttgttggccggacaaagcgtttacgccgcatccggcatgaacaaagcacacgttgttaacaatcagaaatgccgggaataaatcccggcattttcataatcagaagttgtaacctactaccaggtaaccaccccagccggtagagcgaacgttgaagttgccgttgccgaagttcagttctgcatcgtcgttccactgaccaccgtcgtgccagtaacgagctacgacagagtagtgccagtgatcgtagttcagagccagaatatggctggaagcgatagagttattagtacgggtcttaataccgttgattgcgttaccgctgtcatcccctaaatcggaaccccagtcgaagttggtgaagccgatgtagctcagctgaccgccccacagatcggtaatcggcacaaagtatttaattttgaaacggtaaccgtcccactcgttttcgttcgctgcgccatagttctgccactggtatttcgcatagacgttcatggacaggctcatcggcaggccagtgtcgatatcggtacccagacccatgtaccaggtgctctggcgaccatctttattacgacccatgtcgtaaatgtagttgttcgcgaagtaccactctttgaacggaccgaagctaaggtcagtattggtcagcttgtcgatggagaaacgtggttcgatttccataaacagcggagaaccgtggttccagatacctttagcatcggagttaccgccgaagaataccggcgcatccgcataaccatagaagtcgaaccagtcttttttagcgaatgcttcgtactcaaggtaggtatcgttgcggatctgcggtccgaaacgggtgtgatagcttccgacaacgttaacgctctggtgccaccagtcggaaagatactgcggtttgtcgttttcagctgcgttgacagtaaaagagctagagagcgccagtaccgcaccggctgccagtaatgtttttttcatatgtatgccactgtttgaaaatcccttgcgggagtgaaaaaggcgcaaattgcgtttctaaatatttcgtatacagaggagcctattataaaaatcattgctcacaaaaatatgtttcgtttcacagttctatcatttacgtaatcgattgcgttcacgtttacacacattcgggcggggattgtactgactttcgcccttgttgcaaacttttactatcaatccaggtgatgtaagcagagtaacaaaatgacggggaaagatgttgcgggacgcacaaaatcgtcccgaaatacgtttactgcataacaggttgaatgtcgtggatacgtacaaagcctaactgatccacagaaatcccctttaactgtaacggaatatcaacatcgctgggggcgaggacgctggcaggggcattaatcaattgattctgcacattgatttcctgaaagttgtctattgttccctgaatttgcccatattcaacagttccgctgaatgcgggcaagggatcattgctctcaccctgaatacgtagtgtaagggtggtgccatctgcatcaggcgtaatattcaccaggctcatacgtaaagtaccgatctggctttccagtcttgccggtgttttcgctccaggcagaaggtaaaccccactgctggattttgcattcagcctgttttgctgagtgattttgactgtttcttgattgagttgcgtcatctcctggttcagcgtgctgacgctgtgtttcatctgtcgcacttcactttgctgcacacaggcgctaaggctgaacaggcttcccagcaggagcagtcgaaaaacgttagtattcataggtcgtccctttctcgtcgcaattagcctaatggtagagggtaaaagcagcgaaagcatcgatcctttatctcaaaagcgttgcgcctttgttgtatcgtcagttcagggtaaaatagatttccgttaaccacctggtcaggacgccgtatgcattgcccattctgtttcgccgtggacactaaggtaattgactctcgtctcgtgggcgagggtagttccgtacgccgccgtcggcagtgtctggtgtgtaatgaacgtttcaccacctttgaagtggcggagctggttatgccgcgtgttgtaaaaagcaacgacgtgcgtgaaccgtttaatgaagagaaattgcgtagcggaatgctgcgggcgctggaaaaacgtccggtgagttccgatgacgtcgaaatggcaatcaatcatattaaaagccagctgcgcgccaccggtgagcgcgaagtgccgagcaagatgattggcaatctggtgatggagcaattgaaaaagctcgataaagtcgcctatatccgttttgcctctgtctaccgcagtttcgaagatatcaaagaatttggcgaagagatcgcgcgcctggaggactaagccgtgcaggacgagtattacatggcgcgggcgctaaagctggcgcaacgaggacgttttaccacgcatcccaacccgaatgtcgggtgcgtcattgtcaaagatggcgaaattgtcggtgaaggttaccaccaacgtgcgggtgaaccacatgccgaagtacacgcgttgcgtatggcgggtgaaaaagccaaaggtgcgaccgcctatgtcacactcgaaccctgtagccatcatggtcgtacgccaccgtgctgtgacgcactcatcgccgctggcgtagcgcgcgtggttgccagcatgcaagatcctaacccgcaggtcgctgggcgtggactttaccgtctgcaacaggctggcattgacgtcagccacggcctgatgatgagtgaagccgagcaattgaataaaggctttctcaagcggatgcgcaccggctttccttatattcagttaaaacttggcgcaagccttgatggtcgcacggcgatggcgagcggcgaaagccagtggatcactagcccccaggcgcggcgtgatgtacaactactgcgcgcgcaaagtcatgccattttaaccagcagcgccacggtgctggcggatgatcctgccttaacggtgcgttggtctgaactggatgaacaaactcaggcgctctatccgcaacaaaatctccgtcagccgatacgtattgtgattgatagccaaaatcgcgtgacgccggtacatcgcattgtgcagcagcccggcgaaacctggttcgcgcgtacgcaggaagattctcgtgagtggccggaaacggtgcgtaccttgctgattccagagcataaaggtcatctggatctggttgtactgatgatgcaactgggtaaacagcaaattaacagcatctgggtggaagcggggccaacgctcgctggcgcattgctgcaggcgggtttagtcgatgagctgattgtctatatcgcacctaaactattaggcagcgacgcccgcggattatgcacgctgccagggcttgagaaattagccgacgccccccaatttaaattcaaagagatacgtcatgtaggcccggatgtttgcctgcatttagtgggtgcatgatctcccggctcgaaagggaagcagcgcacgaaatattatgctaaaatccgcccccctgcggggccatactcgaacccgaaggaagaaaatgaacattattgaagctaacgttgctaccccggacgctcgcgtcgccatcaccatcgcgcgtttcaacaactttatcaatgacagcctgctggaaggtgcaattgacgcactgaaacgtatcggtcaggtaaaagatgaaaacattaccgttgtttgggtgcctggtgcctatgagctgccgctggcggcgggtgcactggctaaaaccggtaaatacgacgcggtgattgcgctgggtacggttattcgtggtggcactgcccactttgaatatgtcgctggtggtgcaagcaacggcctggcgcatgttgcccaggacagcgaaattccggttgcttttggggttctgaccactgaaagcattgaacaagcgatcgaacgtgctggcaccaaagctggcaacaaaggtgcagaagctgcactgaccgcgcttgaaatgattaatgtattgaaagccatcaaggcctgaaattagtaaggggaaatccgtgaaacctgctgctcgtcgccgcgctcgtgagtgtgccgtccaggcgctctactcctggcagttgtcccagaacgacatcgctgatgttgaataccagttcctggctgaacaggatgtaaaagacgttgacgtcctgtacttccgtgagctgctggccggggtggcgactaataccgcatacctcgacggactgatgaagccatacctgtcccgcctgctggaagaactgggacaggtagaaaaagcagtactgcgcattgcgctgtacgaactgtctaaacgtagcgatgtgccatacaaagtggccattaacgaagcgatcgaactggcgaaaagcttcggcgcagaagacagccataagttcgtcaacggcgtactcgataaagcagcacctgtgattcgccctaacaaaaagtgatatccaggccggtagattcacggaagaccgttccatgatcgccggccttttcttttttacctgctgaggcataacgtatggcatgtggcgagttctccctgattgcccgttattttgaccgtgtaagaagttctcgtcttgatgtcgaactgggcatcggcgacgattgcgcacttctcaatatccccgagaaacagaccctggcgatcagcactgatacgctggtggcgggtaaccatttcctccctgatatcgatcctgctgatctggcttataaagcactggcggtgaacctaagcgatctggcagcgatgggggccgatccggcctggctgacgctggcattaaccttaccggacgtagacgaagcgtggcttgagtccttcagcgacagtttgtttgatcttctcaattattacgatatgcaactcattggcggcgataccacgcgtgggccattaagtatgacgttgggtatccacggctttgttccgatgggacgagccttaacgcgctctggggcgaaaccgggtgactggatctatgtgaccggtacaccgggcgatagcgccgccgggctggcgattttgcaaaaccgtttgcaggttgccgatgctaaagatgcggactacttgatcaaacgtcatctccgtccaagcccgcgtattttacaggggcaggcactgcgcgatctggcaaatagtgccatcgatctctctgacggtttgatttccgatctcgggcatatcgtgaaagccagcgactgcggcgcacgtattgacctggcattgctgccgttttctgatgcgctttctcgccatgttgaaccggaacaggcgctgcgctgggcgctctctggcggtgaagattacgagttgtgtttcactgtgccggaactgaaccgtggcgcgctggatgtggctctcggacacctgggcgtaccgtttacctgtatcgggcaaatgaccgccgatatcgaagggctttgttttattcgtgacggcgaacctgttacattagactggaaaggatatgaccattttgccacgccataaagatgtcgcgaaaagtcgcctgaagatgagtaatccgtggcatctacttgctgtcggattcggaagtggattaagcccgatcgttcctgggacgatgggcagcctggcagcgattccgttctggtatctgatgacctttttgccctggcagctctacagcctggtggtgatgctggggatctgtatcggcgtctatctttgtcatcaaacggcgaaagacatgggtgtgcacgatcatggcagcattgtctgggacgaatttattggtatgtggatcacgctcatggcgctgccgaccaatgactggcagtgggttgccgccgggtttgtgattttccgtattctggatatgtggaagccgtggccgatccgctggtttgatcgcaatgtgcatggcggcatggggatcatgatcgacgatattgtcgccggggtgatttccgcaggcatcctgtattttatcggtcatcactggccgctgggtattctgagctaattgtgcaccgatgcctgatgtgacgcttgtcacgtctcatcaggcctggactcttatttaaatcctacgacaggatgcggtttatacggcgtttccagttcggcaatctgttccggcttcaaagtgatatccaccgcgttcaatagctcatcaagctgttcttcgcggctagttccgataatcggtgcggcaatgcccggtttactcaacaaccaggccagcgcaacttgtgctcgtgtcgcccccagttcttcactgacgcctgttaaccgctctgcgatctgcgcgtcattttcatcgctttctttatagagatttttccccacctcatcagacaccagtcgtgcggtagtttctccccacggacgcgtcagacggccccttgccagcgggctccatggaattaccgccacgccctcctgataacacagtggtagcatctcgcgctcttcttcacgataaatcagattgtagtgatcctgcatactgacaaactgcgcccagccgtgctgtttttggagttccagtgcctgagcaaactggctagcgtgcatactactcgcgccgatataacgcgctttcccggcttttaccacgtcgttgagggcttccagcgtctcttcgatcggcgtgttgtaatcccagcgatgaatttgcaggatatcgacataatccatgccgagacgtcgcaggctgtcgtcgatagagcgcaaaatttgcgcacgggataatccttccggtaaatcaccaacgcgatggaacactttggtcgcaacgaccacgtcttcacgacgggcgaaatcccgcagtgcgcgaccgacgatctcttcgctgctgccgtcagaataactgttggcggtatcaaagaaatttatgccgccttccagtgcacgtttaattatgggacggctgctttcttccggcagtgtccatgcgtgattaccgcgatctggctcgccaaaggtcatacagccgaggcaaagtcgggaaacgcgaaggtcggtttttcctaaggggttgtattgcatgctgccactcctgctatactcgtcatacttcaagttgcatgtgctgcggctgcattcgttcaccccagtcacttacttatgtaagctcctggggcttcactcgtttgccgccttcctgcaactcgaattatttagagtctatgaataatttcttaagcatagcaggagtggagtagggattatgccagccaggccttgattttggcttccataccagcggcatcgaggccgagttcggcgcgcatttcttcctgagttccttgcggaataaagaagtccggcaggccaatgttcagcacgggtactggtttacgatgggccatcagcacttcgttcacgccgctgcctgcgccgcccataatggcgttttcttctacggtgaccagcgcttcatggctggcggccatttccagaattaacgcttcatcaagcggtttcacaaaacgcatatcgaccagcgtggcgttcaggctttcggcgactttcgccgcttctggcatcagcgtaccaaagttaaggatcgccagtttctcgccacgacgcttcacaatgcctttgccaattggtagtttttccagcggcgtcagttccacgccgaccgcgttgccacgcgggtagcgcaccgcactcgggccatcgttatagtgatagccggtatagagcatctggcgacattcgttttcatcgctcggggtcataatgaccatttccggtatgcagcgcaggtaagagagatcaaaagcaccctgatgggtttgaccgtcagcaccaacaatgcccgcgcggtcgatggcgaacaggaccggaagcttttgaatcgccacgtcatgcagcacctgatcataggcgcgttgcaggaaagtggagtaaatcgcgacaatgggtttgtacccaccaatcgccagacccgcagcaaaggtcaccgcgtgttgctcggcaattgccacgtcgaagtagcgatccgggaatttacgactaaactcgaccatgccggaaccttcacgcatcgccggagtaatcgccatcagcttgttgtctttcgctgccgtttcgcacaaccagtcgccaaagattttactatagctcggcaaaccgccgctacttttcggcaaacaaccgctggagggatcaaatttaggcacggcgtggaaagtgatcgggtctttttctgccggttcataaccacgaccttttttggtcatgatatgcaggaactgcgggcctttcaggtcgcgcatgttctttagcgtggtgataagccccagcacatcgtgaccgtccaccgggccgatgtagttaaagcccagctcttcaaacaacgtgccaggcactaccatgcctttaatatgttcttcggtgcgtttgagcagctctttaattggcggcacgccagagaaaacttttttcccgccttcgcgcagactagagtaaagcttaccggaaagcagctgtgccagatggttgttgagcgcgccgacattttcggaaatgctcatttcattgtcgttgagaatcaccagcatatcaggacggatatcgcccgcgtgattcatcgcttcaaacgccatgcctgcggtaatcgcgccatcgccaatgacacagacggtgcggcgatttttgccttctttttcggcagcaaccgcaataccaattccggcactgatggaggtactactatgcccgacgcttaatacgtcatattcgctttcgccgcgccacgggaacgggtgcagaccgcctttctgacggatggtgccgattttgtcgcggcgtccggtcaaaattttatgcggataagcctgatgccccacatcccaaatcaattggtcaaacggggtgttgtagacatagtgcagcgccacggtcagttcgaccgtgcccagcccggaggcgaagtgcccgctggaacggctcacgctgtcgagtaaatagcggcgcagttcgtcgcagagtttcggtaaactctctttcggcaacagtcgtaactcctgggtggagtcgaccagtgccagggtcgggtatttggcaatatcaaaactcatcaggggcctattaatacttattgtttatttattacgctggatgatgtagtccgctagcgcttccagtgcgctggtatcgagactctgttcagccagttgtttcaggctctgacgggcatcgtcgatcagatcccgggctttcttccgggcttgctcaagacccagaagtgcagggtaggtacttttaccaagttgctggtcggcaccctggcgttttcccaacgttgcagtatctcccaccacatccaggatgtcatcctgaacctggaaggcaaggccgatgctctctgcatacttgtcgagtaccggcagagcacgacgtcctttatctccggcgcttaatgcaccaaggcgaacggcggcgcgaatcaatgcgccggttttatgacgatgaatacgctcaagcgcgtccagaggtacgtgtttgccttccgcgtctaaatctaatgcctgaccaccgcacattccggcaataccactggcgctcgccagttcagaaatcatgctaattctgtcgcggtcgctcacttccggcatatcggcatcgcttaaaatgctgaacgccagcgtttgtaaagcgtcgccagcgagaatcgcgtttgcttcgccaaacttcacatggcaggttggcaaaccgcgacgcagatcgtcatcatccattgccggtaaatcatcatgaattaaactgtaagcgtggatacactcaacggcggcagcgggtgcgtccagcgtgtttgtgctaacgccgaacatatgaccggcggcataaaccaggaaaggtcgcaggcgcttaccacctaataatgcgccatactgcatggtttcgaccacgggagtgttctgaaagggcagtggggcgataaaacggctcagcgcctggttggcctgcttaacgcaggcttcgagttgctgcggaaagtccattactcattgtccggtgtaaaaggggttagagaggcgtcttcattgtcagacagcagaatttgtacgcgctgttcggcttgttgtaatttggcctgcccctgacgtgccagctgcacgccgcgttcgaactcgttcagcgcctcttccagcggcaggtcgccactttccagacgggttacaatctgttccagctcgctcagcgccttttcaaagctggcgggcgcctcatttttcttcggcataatgaatgtctgactctcaatatttttcgccccgtcatggtaacggactcagggcaaatagcaaataacgcgcaatggtaaggtgatgtgcacagcaaagcgatgttagtggtatacttccgcgcctggatgcagccgcaggtgtgggctgctgtatttttccctatacaagtcgcttaaggcttgccaacgaaccattgccgccatgaagtttatcattaaattgttcccggaaatcaccatcaaaagccaatctgtgcgcttgcgctttataaaaatccttaccgggaacattcgtaacgttttaaagcactatgatgagacgctcgctgtcgtccgccactgggataacatcgaagttcgcgcaaaagatgaaaaccagcgtctggctattcgcgacgctctgacccgtattccgggtatccaccatattctcgaagtcgaagacgtgccgtttaccgacatgcacgatattttcgagaaagcgttggttcagtatcgcgatcagctggaaggcaaaaccttctgcgtacgcgtgaagcgccgtggcaaacatgattttagcagcattgatgtggaacgttacgtcggcggcggtttaaatcagcatattgaatccgcgcgcgtgaagctgaccaatccggatgtgactgtccatctggaagtggaagacgatcgtctcctgctgattaaaggccgctacgaaggtattggcggtttcccgatcggcacccaggaagatgtgctgagcctcatttccggtggtttcgactccggtgtttccagttatatgttgatgcgtcgcggctgccgcgtgcattactgcttctttaacctcggcggcgcggcgcatgaaattggcgtgcgtcaggtggcgcattatctgtggaaccgctttggcagctcccaccgcgtgcgttttgtcgctattaatttcgaaccggtcgtcggggaaattctcgagaaaatcgacgacggtcagatgggcgttatcctcaaacgtatgatggtgcgtgccgcatctaaagtggctgaacgttacggcgtacaggcgctggtcaccggcgaagcgctcggccaggtgtccagccagacgctgaccaacctgcgcctgattgataacgtctccgacacgctgatcctgcgtccgctgatctcttacgacaaagagcacatcatcaacctggcccgccagattggcaccgaagactttgctcgcacgatgccggaatattgtggtgtgatctccaaaagcccgacggtgaaagcagttaaaagcaagattgaagcggaagaagagaagttcgacttcagcattctcgataaagtggttgaggaagcgaataacgttgatatccgcgaaatcgcccagcagaccgagcaggaagtggtggaagtggaaaccgtcaatggcttcggcccgaacgacgtgatcctcgatatccgttctatcgatgaacaggaagataagccactgaaagtcgaagggattgatgtggtttctctgccgttctataaactgagcaccaaatttggcgatctcgaccagaacaaaacctggctgctgtggtgtgagcgcggggtgatgagccgtctgcaggcgctctatctgcgcgagcagggctttaacaatgtgaaggtatatcgcccgtaatttgtggtttttacgtcgcatctggtcagatgcgacgtttgccgcatccgacattactcgtaataattataaatccctgccgccatcaccagttgacttgccacttcatgggctttttcacgcccaaccaacaggtcgataattttcagaccaaagtcgatagctgtacccggcccctggctggtcagcaattttacccgtgcatcccagacgacgcgcttgtccagccattgttcggcgggaattttgtctttcagcgtcgggaagccggtcatattaccaatcgggaagatatcgtgcggcaccagcacggtggctggcgcggcgcaaatagccgcgacgatacgcccggaacggtggaactgtttaacggtttcaaccagcagagtgctatcgcgaaaacactccgcgcctttaatgccaccaggcagcacgatcacgtcatattcgccatcagccacttcgaccagcggcgcatccgccagcagcttcacgccgcggctgcaggtaatcgccaggttaccatcgctggcgacgctggcagtggtgactttgataccgccgcgaaccagcagatcgatagtggtgacggcttcagtctcttcactaccaggggcgaggcaaaccagtgcgcttgcgctcatattcactctcctttctttttttaattaccaggggcgaggcaaaccagtgccgatgcgctcatattcactctcctttctttttaccatttcaaacaggcgggtgttttccggtacggcaatcccatgcgcgcgggcgcggcgtaagagaaaaccattgatatagtcgatttcagtgtggcgcagcgcgcggatatcctgcaacatgctgctgatattttccgctgtggcatcaatcacctgcatcacgtaatcacgcaaatcttctgcactagtatgatgcccttcgcgttcgatcaccgccgcgacttcttcgcatatctgcataatttcttgcggatgatgacgtaattcaccgttcgggcaattccagatggcagtcagtggattaatcacgcagttgactgccagcttgcgccacagctcggcgcgaatattgttatgccaggcaacgtcaggcaacacggtttgcaaaatatccgccagataactgtaatccccgtcctgttgccgtgccgggccaatatgcgtgataccgtttgccacatgaataatgacattgccgtcgcggcgggctgcatgggtggtggtgcccatcagtaatggctgctgaatgttttgcaactcttcgatggtgcccatgccgttgtgaattaacagtattggcgtagttacaggcagtgtggacgcgaggcttttgacggcatcggaaacctgccatgctttcagcgtcaccaggagcagatcgctggtggcgagaaaatcgggatcgttggcggtcaggctttcgttaaatatgctaccatctgtctcaaccagattcacgctacaataaggttgcggtacgcgcagccagccctgaacttcatgaccctgtttgcaaagtgctgtaagccataattgccctaaggcaccgcatcccaatacggtaattttcattgttcctcctcacccgcaaccactccgggtgttcaataaggctatcccttaattgtgcatgctgttgcgactatgcacaattaagggatacgtcctggtgcaggactgtcggttatttaactttgcgggtattatgcttcgcatcaaaaatgaagggagaggaaaagatgccatctttcgatattgtctctgaagttgatcttcaggaagcacgtaacgcggtcgataacgcgagccgcgaagtggagtcccgttttgacttccgtaacgttgaagccagttttgagctgaacgacgccagcaaaaccatcaaagtgttgagcgagtccgatttccaggtcaatcagttgctggatattctgcgtgccaagctgctgaagcgcggcattgaaggcagtagcctggatgtaccggagaatatcgttcatagcggtaaaacctggtttgtggaagcgaaactgaaacagggcattgagagcgcgacccagaagaaaatcgtcaagatgatcaaagacagcaaactgaaagtgcaggcgcaaattcagggcgatgaaatccgcgtaacgggcaaatctcgtgatgatttgcaggctgtcatggcgatggtacgtggtggcgatctcggtcagccgttccagttcaaaaacttccgcgattaatcgcgactatgtgcgttttgttcatgtcagatgcggcatgaacgcctgattcggcctacaaaggtttgtaattcagaaactttgtaggcctgataagcgtagcgcagcaggcaattcgccgcgttttttatgcctgacgaattgcctgttctatctcaaagcgattcgtcactttgctgtcgattttcacataagcactatgttcttcttctgcaatcaacacttctttgatgccttcagtttctagcaaacgcacttttaacgcctcgtttgcggcaatgttcgccgggatttcaatgcgcaaactgctgacatacggcggttctttcatggtactggcgactgtcagccacactgcggccagcattgcgccagcgagaaataccccctgaccgtcaaacatgccgttaatccagccgcccaggctaccgccaatcgccacgccaagaaactggctggtggagtaaacacccatcgccgtacctttgtaacctgctgggctctctttactgataagactgggcaggagggcttccatcaaattaaacgccacaaagaaaagctgcacgccgaccaccagttgccagaactgcgtttgcgcgttccacaacacaatttccgcaaccacgatcaacccgacgcagaagacaaagacttgcttcattttgcgcttaacttcagcgtagataatgaaaggcacgacgctgccaaaggcgattagcattgtcgccagatagaccttccagtgttcagccgccgggaaccctgcatcagccagttgtccgggcagggcaacaaacgtgctcatcagcaaaatatgcagacacataatgccaaagttgagtttcagcagccgcggttccgccagcactttactgaaactgcctttcaccattccggactcacgattaagtacgtgagtgctactgttgggcacaacccaaatggtcaacgcaatgccggtcgttgccagaatagcgatcatccagaacagcgcgtgcagcccaagtttgtgagtgatgatcgggccaagcaccatcgcaatggcaaaggtaatgccaaagctcacgccgataaacgccatcgctttggtgcggttttgttcgcgcgtgagatcggaaagcagcgccataacggcggcggcaattgctccagagccttgtagcgcccggcccagaataattccccagatggagtcggaaagcgcagcgataacgctaccggcggcaaacaccgccagcccaccgacaattaatggtttgcgaccaatgcggtcggaaagcaggccaaacggaatctgaaaaacggcctgagtcagaccataaataccaatggcaataccgattaatgcttcgctggcaccttgcagagccatgccgtacgtggtcagaaccggcagaaccataaacatgcccagcatgcgcaagctgaatacggtccctaaaccccaggtcgcgcgcctctcacctggcgtcattttataatcgttcattaccacctctgttttaaattcgcgactagtgtaaagcggcaaacgaatggggtaaacatgcggattttttagtaaatatttcgagagggatatgtttctaatgctaagaaaaaaggtgccgtagcacctttttaatagagaggttttgttaccacacagcagccagcagcgtatggctgtccggtaccataaaatcaacggacatcatcacgctgagggcagtgatggcgatgatagagaagccgaacagcttgcgcgcccagattctgtcatcagcaactttataaccgcgcagagccatacctaaccaccagacgctaaccgccgcggcgaccaccagatatttatacccagcgtaaccgccaagagagagcatcagcgtggcaacggcaaaggcgatgatatacagcgtgatgtgattcttcgccacgctaatgccttttaccactggcaataccggaatgtttgccgcctggtaatccttaaagcggaaaatggcgatggcataggagtgaggcatctgccacaggctgaagatagccagcaggatcgctgcgccgctatcgaactcaccggttaccgcacagtagccgatcaccggcggcgcagcgccggagaggctaccaatcaacgtgccgtagacagagtggcgtttcatgtacaggctataaacgccgacataaaccacaaagcccatcacccccagccagcaggccagcggattcgcgccaaaccacagcagcataaagccagcaatacccagcaacgtggcgtacaccaggctgacagcaggagagatcaggcctttcaccagcacccgattcttcgtcctttccatctttctgtcgatatccctgtcgatgtagttgttaaacacacaaccgctcgccacaaccagactcaccccaaccagcgtgtagataaacaggggataatcaatgctgcccttactggccagcaggaatcccccaatcacgctgatcaggttgccaaagatgatgcctggtttcgttacttgcaggtattgcttaaacatcataaccgccgctcttagtgcatcatcatgttgtagttgaggttccacataatccagatggagcctacaaccaggatagcgatgattagcacggtgaagacaaacgccgtcatgttccagccttcatcacttttggtattcatgtgcaggaagcacaccagatgcaccagaacctgtaccactgccattgccaggattgttcccagaattacggccggagaggcagctcctgtcatcaccatccagaacggaatcaccgtcagaatgatgctcaggataaagcctgtcatgtaggtttttacgctgccatgggacgcgccgctgtgatcggtagaatgactcattacatcgcccccatcagataaacaacagtgaacacacagatccaaaccacatccaggaagtgccagaacaggctcaggcacatgatgcgggtacggttagtgctggtcaggccgcgacgggcgatttgcaccatcagcaccgccatccagataagaccagaagtgacgtgcagaccgtgcgtgccgaccagcgcaaagaacgcactcaggaagccgctgcgatccggacccatgccgttaacaatcaggtgatggaattcatagatttccatcccgataaatccggcaccaaacaaccaggtcaacgccagccaggagataacctggcttttgttgtttttgtacatggcgatagccgccatgccgtaggtgatggagctgaacaacagcaagaaagtttcaaccagaacgaacggcagttcgaaaatgtccttacctgtcgggccgcctgcggtgccgttcaccagaacggcataggtagcaaacaagatagagaacagaatgcagtcgctcatcaggtagatccaaaatccgaagattttggttccgcctgcatcgtggtgcccgtgttcgtgcgcgtgggcagtcgcgtgcgtcaaagtatcagttgccatttttcagccctgccttagtaatctcatcgaaatgctggttttccagtttttcgatttctgccaccggcacgtagtaatccacgtcctcgtcgaagcttttcacgatccaggtgatgatcatgcctgcgaagccaacaatcgccagccaccagatatgccagatcatggcgaaaccgaagatggtggagaaagctgcaatgacgatacctgcaccgctgtttttcggcatatgaatttcttcatagtggtcaggctttttatacgcttcgcctttctctttcatttcccagaatgcatcacgttcgtgaacgtgcggcactacggcaaagttatagaacggaggcggggaagaggttgcccactccagcgtacggccaccccacgggtcgccagtcaggtcacggttctggtcgcggtcgcgaatagaaacgtacatctgaataacgaggcagagaatacccagcgcaatcagtactgcaccgctggctgcaatcatcagcatggtgtggaactgcgggtcaatctgctggctcaaacgacgggtcatgcccatgaagcccagcgcatacagtggcataaaggcaacgaagaagccgatgatccagaaccagaacgcgcgtttaccccaggtttcgttcagtttgaaaccgaacgctttaggccaccagtaggtcatccctgcgaagcagccgaagaccacgccgccgatgatcacgttatggaagtgcgcaatcaggaacaggctgttatgcagaacgaagtccgcgcccggtacggccagcagcacgccagtcatcccgcccacgctgaaggtgacgataaaaccgatggtccacagcatcgcagaatggaacacgatgcggccctgatacatggtgaacagccagttgaagatcttcaccccggtcgggatggcgataatcattgtggtgataccaaagaaggcgtttacgttcgcgcccgcacccatcgtaaagaagtggtgcagccaaacgatgaagctcagcacggtgatacaggcggttgcccataccaggctggtataaccaaacagacgtttacggctgaaggttgccgcaatttcggagaacacaccgaaaacaggcaggatcaggatgtaaacttccgggtggccccaggcccaaatcaggttgatgtacatcatcatgttgccacccatatcgttggtaaagaaatgggtgcccagatagcgatccagggtcaacaacgcgacggtaaccgtcagaattgggaaggaagcaataatcagtacgttcgcgcacagacttgcccaggtaaatactggcatcttgaacatggtcatgcccggtgcgcgcatcttcagaatggtaacgaagaagttgataccggtaagcgtcgtacctataccggatagctggagactccatatccagtaatcgacaccgactcccggactgtactctattccgcttagcggtggataggccagccagccggtctgcgcaaattcgcccacgccgagagaaacgttaaccagaatcacaccaacaacggtaaaccagaagcttaagttgttgaggaacgggaacgcaacgtcacgcgcgccgatctgcagcggaaccaccaggttcatcagaccgataacgaaaggcatcgccacgaagaagatcataatcacgccgtgcgcggtaaagatctgatcgtagtggtgaggtggcaggaagcccgcttcgcccgcgctggcaagagcctgctggctacgcatcataatggcgtcagcaaaaccacgcagcaacatcacaatcgccacgatgatatacatgataccgaggcgtttatggtcgacggaggtcagccactctttccacaggtaggtccacttaccgaagtaagtgatcaggccaacgagcgccagacctcccaaaataatgccagcgatcgtaaccatgacgataggttcatggaacgggactgcatcaagacttaattttccgaacatctttattcttcctcaacccctttaatgggcggattccgcgtggctcatgtccatgccttccataccttcgtgtgcgctgtgctcaccttctggctgggtcatgtccatgctcttaccgtgagccataaacttgttaattacatcggcaaacaagtctggtttcacgttggagaaatattccacctggttgtattcgctaggcgcggccagtttttcgaacgcagccatgtcagacatggtgttcgggctctgcttcgcttttgcgacccactggtcgaatgcggcgcgatccggtgttgcaatagctttgaacttcatgccactgaagcccgggccgctgtagctggcggagataccgtcataagtgccgggttcgttggcgatcagatgcaggcgagtctgcataccggccatggcataaatctggctacccagacgcggaatgaagaaggagttcatcacggagttggaggtcactttgaagtacaccggagtgttcgccgggaaagcgatttcattcacggtagcaatgccctgttccgggtagatgaagaaccatttccagtccatggaaaccacttcgatggtaatgggcttctcgtcgtgtgccagcggcttgctaggctcaagagcgtgagtggttttccaggtcagtactgcaaggaagatgatgattaagataggtaccgtccagaccacagcttccactttattggagtgactccagttcgggctgtacttagcatctttattgctcgcacggtacttccaggcgaaaccaacagccatcaagattgcgggaataacgacaatcaacatcaggccaaatgccgtcagtatcagactacgttgctccagaccaatctgtcctttgggatctaacagcgcagaattacagccactgagcaatacagtgcctgcaaataaactcaaccatcccaaacttttattgtatttcctgagtctcatttaacgacctcaattccacgggatctggtggcgtttaaagtgtgtgggcattttacgggaaggttacattactgtaaacatgattaaattcctgttacttggatttggctgccaggtcacatatgttgcaaaacatatcaggttgattttaagaagctgttgcaaaagggcgttataacaaaaggggagtgctgaaggagtctgggcgggcaattggtataaccaatgtgaaataaaacaattatttaacaaataattatcattagagtgacaactgggtgatgagaaaataaagactcattagctgaatcgtgtaagaaaaatagaatttataaatggcgccaataatttccaaacgctaagccgcacaaaagaacaaatattaataagcgatactgatgtttatttagccgtaataattacggcgagtgattactacagctaaataatatttacagattacgtcagatgcgtttttcgtagcgccagataatccagcaaaccaccaagcacgacgccagaaagggcgactaaaaccccgacttccagcagagcaggcaggaaagagaagtgcgtcaaatccagcgcgtccatcgtcaatagcagtaaccacacggccaacaggctgacgcccgccgccagtgtccacatggcaaaggcataacctgccggatatgcggtacgggagataaagttgtcatttactcgtgtatattcaagcgtctggcggcaaaccagcagcaaaataagccctggtacggcagcggcgacggagaatagatagaatgtgctccagccgtgtgcttcaacaaaccaacccgccacggggccgacataaactcgccctacagcagaaagcgcactgagcagggcaaattgagtagcggaaaaactcttattacatagcgtcattaacagcgcgacaaaggcacttgtgcccatcccgccacagaggttttcgaaaaagacggctgcgcccatgctgtagagatgcttatcagtaatgctcagcagccagtaaccggcgttagacgcaccttgtaaaatgccgaaaatcagcagtgcccggaacagactcaggcgctgcatcaaaatcccaccgtacaatgcgccaacaatggtcgctagtaagccaagcgttttgttaaccacgcctacttcacccgcatcaaacccgacgccgcgaatcaaaaacgtggttgtcaggctcatggcgaatgcgtcgcccagcttatacagcacgataagaagcaaaataagccaggcattattgcgaccaaagaaatctcgcagaggtgcaacaaccgcttgttccagcgttttgggcacaggaatggtgtcggttggttctggtgcaagcaacgtcgcgataatacaggggatcaacagtgccgccattaaccagtacatgccctgccagcccagccatttatctgccagccacagggctaggccgccggaaaccagcatccctaaacggtaacccagcacgctgattgccgcgcccgcaccacgttcttctgccggaagcacatcggttttccacgcatcgaagactatatcctgggaagcagagcaaaaagcgatcaccactgccagcgccgccatccagcggagttgggtgcctggttcgagaaaacccatcgccgcaatggcgactaataacaggatttgcgtggcgagcagccaaccgcgccgccgcccaaaaaatggaggcgtgtagcggtccatcagcggactccagaggaatttaaaaacgtaagcctggcctaccagagagaagaaaccaatggttttgagatcgatattctcgaccgtcatccaggcctgtaaggtaccggatgtcagggcgagcggtagcccggaagcaaaacccaggatcagcaatatggcactacgcggctgttgaaaaatacgtaaatattgactggacatgggcgtctacaggcccggcttgcaccgggccagagggcagaaattaacgcgcgttctgcttgatgaattcgtggatgctggtgtcctgagacatatcagcgatggtatcggtcagcacactgttaaccgcatcggcgatatttttgttggaggcctggaacgcaccttcaacgttgtagctggcacgatagtttttggtcattttgttgccattctgcgcggtagcgatgatggcgatatccgctttggtcgcgatgttgtagcgcacgttgccctgggacacgtcagcatacagttggctaacgatgatttgcagattaaccgggccattcggaccaaccatgtaaccacgcgcggtcatctgtttttccagcacttcttgcagcaggaaacgcagatcgcgggaggcggtcagggtaacgatttgattatcgcgggtgacttttgccagcgcctgatcggtacgctgatcggcaccattaatgcttacggtgacgcccatcaggcttggatcctgctgtggcagtgtaatcgtcggggaaacttcaatagttgttggcggttttgcgcatcctgcaagcataaacagagcaactaacgggaagaggatttttttgaacatgttcgggctctcagagactcttaagcgtgtttggtaaaaattcccgccatcataacattgccaacggcgaggggaagtgggtaaggcatgtaaattcatcatgttgacgaaataatcgcccctggtaaaagaaacactgatgcgaggcctgtgtttcaatctttaaatcagtaaacttcatacgcttgacggaaaaaccaggacgaaacctaaatatttgttgttaagctgcaatggaaacggtaaaagcggctagtatttaaagggatggatgacatctcagcgttgtcggaggagatatttcatgatgatacgtgagcggatagaagaaaaattaagggcggcgttccaacccgtattcctcgaagtagtggatgaaagctatcgtcacaatgtcccagccggctctgaaagccattttaaagttgtgctggtcagcgatcgttttacgggtgaacgttttctgaatcgtcatcgaatgatttacagtactttagcggaggaactctctactaccgttcatgcgctggctctgcatacttacactattaaggagtgggaagggttgcaggacaccgtctttgcctctcctccctgtcgtggagcaggaagcatcgcgtaaaaacgcatttgcaactgtcggcgcttttccagtatgttgctaaagattttatgaaaaacggcctgcgggccgttttgttttgtctggattttgcgctttttgcccagcattcagacgaaaattgcccgggaattgtgaaaaaatacgcgacagcgcgcaataaccgttctcgactcataaaagtgatgccgctataatgccgcgtcctatttgaatgctttcgggatgattctggtaacagggaatgtgattgattataagaacatcccggttccgcgaagccaacaacctgtgcttgcggggtaagagttgaccgagcactgtgattttttgaggtaacaagatgcaagttagtgttgaaaccactcaaggccttggccgccgtgtaacgattactatcgctgctgacagcatcgagaccgctgttaaaagcgagctggtcaacgttgcgaaaaaagtacgtattgacggcttccgcaaaggcaaagtgccaatgaatatcgttgctcagcgttatggcgcgtctgtacgccaggacgttctgggtgacctgatgagccgtaacttcattgacgccatcattaaagaaaaaatcaatccggctggcgcaccgacttatgttccgggcgaatacaagctgggtgaagacttcacttactctgtagagtttgaagtttatccggaagttgaactgcagggtctggaagcgatcgaagttgaaaaaccgatcgttgaagtgaccgacgctgacgttgacggcatgctggatactctgcgtaaacagcaggcgacctggaaagaaaaagacggcgctgttgaagcagaagaccgcgtaaccatcgacttcaccggttctgtagacggcgaagagttcgaaggcggtaaagcgtctgatttcgtactggcgatgggccagggtcgtatgatcccgggctttgaagacggtatcaaaggccacaaagctggcgaagagttcaccatcgacgtgaccttcccggaagaataccacgcagaaaacctgaaaggtaaagcagcgaaattcgctatcaacctgaagaaagttgaagagcgtgaactgccggaactgactgcagaattcatcaaacgtttcggcgttgaagatggttccgtagaaggtctgcgcgctgaagtgcgtaaaaacatggagcgcgagctgaagagcgccatccgtaaccgcgttaagtctcaggcgatcgaaggtctggtaaaagctaacgacatcgacgtaccggctgcgctgatcgacagcgaaatcgacgttctgcgtcgccaggctgcacagcgtttcggtggcaacgaaaaacaagctctggaactgccgcgcgaactgttcgaagaacaggctaaacgccgcgtagttgttggcctgctgctgggcgaagttatccgcaccaacgagctgaaagctgacgaagagcgcgtgaaaggcctgatcgaagagatggcttctgcgtacgaagatccgaaagaagttatcgagttctacagcaaaaacaaagaactgatggacaacatgcgcaatgttgccctggaagaacaggctgttgaagctgtactggcgaaagcgaaagtgactgaaaaagaaaccactttcaacgagctgatgaaccagcaggcgtaatttacgcagcataacgcgctaaattcgcacaaaggcccgtcaccgccaggtggtgggcttttttttgtcatgaattttgcatggaaccgtgcgaaaagcctctttcggtgttagcgtaacaacaaaagattgttatgcttgaaatatggtgatgccgtacccataacacagggactagctgataatccgtccataaggttacaatcggtacagcaggttttttcaattttatccaggagacggaaatgagttacagcggcgaacgagataactttgcaccccatatggcgctggtgccgatggtcattgaacagaccagtcgcggtgagcgctcttttgatatctattctcgtctacttaaggaacgcgtcatttttctgactggccaggttgaagaccacatggctaacctgattgtggcgcagatgctgttcctggaagcggaaaacccagaaaaagatatctatctgtacattaactccccaggcggggtgatcactgccgggatgtctatctatgacaccatgcagtttatcaagcctgatgtcagcaccatctgtatgggccaggcggccagcatgggcgctttcttgctgaccgcaggggcaaaaggtaaacgtttttgcctgccgaatagccgcgtgatgattcaccaaccgttgggcggctaccagggccaggcgaccgatatcgaaattcatgcccgtgaaattctgaaagttaaagggcgcatgaatgaacttatggcgcttcatacgggtcaaagtttagaacagattgaacgtgataccgagcgcgatcgcttcctttccgcccctgaagcggtggaatacggtctggtcgatagcattctgacccatcgtaattgatgccagaggcgcaactgtgccgctatacttatccagggcggcacaacgctgtaagcggcttgcgcctgagaatggcatttgcgtcgtcgtgtgcggcacaaagaacaaagaagaggttttgacccatgacagataaacgcaaagatggcagtggcaaattgctgtattgctctttttgcggcaaaagccagcatgaagtgcgcaagctgattgccggtccatccgtgtatatctgcgacgaatgtgttgatttatgtaacgacatcattcgcgaagagattaaagaagttgcaccgcatcgtgaacgcagtgcgctaccgacgccgcatgaaattcgcaaccacctggacgattacgttatcggccaggaacaggcgaaaaaagtgctggcggtcgcggtatacaaccattacaaacgtctgcgcaacggcgataccagcaatggcgtcgagttgggcaaaagtaacattctgctgatcggtccgaccggttccggtaaaacgctgctggctgaaacgctggcgcgcctgctggatgttccgttcaccatggccgacgcgactacactgaccgaagccggttatgtgggtgaagacgttgaaaacatcattcagaagctgttgcagaaatgcgactacgatgtccagaaagcacagcgtggtattgtctacatcgatgaaatcgacaagatttctcgtaagagtgacaacccgtccattacccgagacgtttccggtgaaggcgtacagcaggcactgttgaaactgatcgaaggtacggtagctgctgttccaccgcaaggtgggcgtaaacatccgcagcaggaattcttgcaggttgatacctctaagatcctgtttatttgtggcggtgcgtttgccggtctggataaagtgatttcccaccgtgtagaaaccggctccggcattggttttggcgcgacggtaaaagcgaagtccgacaaagcaagcgaaggcgagctgctggcgcaggttgaaccggaagatctgatcaagtttggtcttatccctgagtttattggtcgtctgccggttgtcgcaacgttgaatgaactgagcgaagaagctctgattcagatcctcaaagagccgaaaaacgccctgaccaagcagtatcaggcgctgtttaatctggaaggcgtggatctggaattccgtgacgaggcgctggatgctatcgctaagaaagcgatggcgcgtaaaaccggtgcccgtggcctgcgttccatcgtagaagccgcactgctcgataccatgtacgatctgccgtccatggaagacgtcgaaaaagtggttatcgacgagagcgtaattgatggtcaaagcaaaccgttgctgatttatggcaagccggaagcgcaacaggcatctggtgaataattaaccattcccatacaattagttaaccaaaaaggggggattttatctcccctttaatttttcctctattctcggcgttgaatgtgggggaaacatccccatatactgacgtacatgttaatagatggcgtgaagcacagtcgtgtcatctgattacctggcggaaattaaactaagagagagctctatgaatcctgagcgttctgaacgcattgaaatccccgtattgccgctgcgcgatgtggtggtttatccgcacatggtcatccccttatttgtcgggcgggaaaaatctatccgttgtctggaagcggcgatggaccatgataaaaaaattatgctggtcgcgcagaaagaagctagtacggatgagccgggtgtaaacgatcttttcaccgtcgggaccgtggcctctatattgcagatgctgaaactgcctgacggcaccgtcaaagtgctggtcgaggggttacagcgcgcgcgtatttctgcgctctctgacaatggcgaacacttttctgcgaaggcggagtatctggagagcccgaccattgatgagcgggaacaggaagtgctggtgcgtactgcaatcagccagttcgaaggctacatcaagctgaacaaaaaaatcccaccagaagtgctgacgagcctgaatagcatcgacgatccggcgcgtctggcggataccattgctgcacatatgccgctgaaactggctgacaaacagtctgttctggagatgtccgacgttaacgaacgtctggaatatctgatggcaatgatggaaagcgaaatcgatctgctgcaggttgagaaacgcattcgcaaccgcgttaaaaagcagatggagaaatcccagcgtgagtactatctgaacgagcaaatgaaagctattcagaaagaactcggtgaaatggacgacgcgccggacgaaaacgaagccctgaagcgcaaaatcgacgcggcgaagatgccgaaagaggcaaaagagaaagcggaagcagagttgcagaagctgaaaatgatgtctccgatgagcgcagaagcgaccgtagtgcgtggttatatcgactggatggtacaggtgccgtggaatgcgcgtagcaaggtcaaaaaagacctgcgtcaggcgcaggaaatccttgataccgaccattatggtctggagcgcgtgaaagatcgaatccttgagtatcttgcggttcaaagccgtgtcaacaaaatcaagggaccgatcctctgcctggtagggccgccgggggtaggtaaaacctctcttggtcagtccattgccaaagccaccgggcgtaaatatgtccgtatggcgctgggcggcgtgcgtgatgaagcggaaatccgtggtcaccgccgtacttacatcggttctatgccgggtaaactgatccagaaaatggcgaaagtgggcgtgaaaaacccgctgttcctgctcgatgagatcgacaaaatgtcttctgacatgcgtggcgatccggcctctgcactgcttgaagtgctggaaccagagcagaacgtagcgttcagcgaccactacctggaagtggattacgatctcagcgacgtgatgtttgtcgcgacgagcaactccatgaacattccggcaccgctgctggatcgtatggaagtgattcgcctctccggttataccgaagatgaaaaactgaacatcgccaaacgtcacctgctgccgaagcagattgaacgtaatgcactgaaaaaaggtgagctgaccgtcgacgatagcgccattatcggcattattcgttactacacccgtgaggcgggcgtgcgtggtctggagcgtgaaatctccaaactgtgtcgcaaagcggttaagcagttactgctcgataagagtttaaaacatatcgaaattaacggcgataacctgcatgactatctcggtgttcagcgtttcgactatggtcgcgcggataacgaaaaccgtgtcggtcaggtaaccggtctggcgtggacggaagtgggcggtgacttgctgaccattgaaaccgcatgtgttccgggtaaaggcaaactgacctataccggtagcctcggcgaagtgatgcaggagtccattcaggcggcgttaacggtggttcgtgcgcgtgcggaaaaactggggatcaaccctgatttttacgaaaaacgtgacatccacgtccacgtaccggaaggtgcgacgccgaaagatggtccgagtgccggtattgctatgtgcaccgcgctggtttcttgcctgaccggtaacccggttcgtgccgatgtggcaatgaccggtgagatcactctgcgtggtcaggtactgccgatcggtggtttgaaagaaaaactcctggcagcgcatcgcggcgggattaaaacagtgctaattccgttcgaaaataaacgcgatctggaagagattcctgacaacgtaattgccgatctggacattcatcctgtgaagcgcattgaggaagttctgactctggcgctgcaaaatgaaccgtctggtatgcaggttgtgactgcaaaataatgacctcgcgcaaaatgcactaataaaaacagggctggcaggctaattcgggcttgccagcctttttttgtctcgctaagttagatggcggatcgggcttgcccttattaaggggtgttgtaaggggatggctggcctgatataactgctgcgcgttcgtaccttgaaggattcaagtgcgatataaattataaagaggaagagaagagtgaataaatctcaattgatcgacaagattgctgcaggggctgatatctctaaagctgcggctggccgtgcgttagatgctattattgcttccgtaactgaatctctgaaagaaggggatgatgtagcactggtaggttttggtacttttgccgttaaagagcgtgctgcccgtactggccgcaacccgcagaccggtaaagagatcaccatcgctgctgctaaagtaccgagcttccgtgcaggtaaagcactgaaagacgcggtaaactaagcgttgtccccagtggggatgtgacgaagttcaagggcgcatctactgatgtgccttttttatttgtattcggtgactttctgcgtcttgtgggctgacaattgcccccgtttcttgtcacaataggcctttgcgcgcatcgatacgttgcgtgaggtacacagtcatctacagcggagtgttgttacaccatgatggacagcttacgcacggctgcaaacagtctcgtgctcaagattattttcggtatcattatcgtgagcttcatattgaccggcgtgagtggttacctgattggcggaggcaataactacgccgcaaaagtgaatgaccaggaaatcagccgtgggcaattcgagaacgccttcaacagcgagcgtaatcgcatgcagcaacagctgggcgatcaatactccgagctggcagcgaacgaaggctatatgaaaaccctgcgtcaacaggtgctgaatcgtctgatcgacgaggcgctgctggatcagtacgcacgtgagctgaaactgggtatcagcgatgagcaggttaaacaggcgattttcgcgaccccagccttccaggttgacggcaaatttgataacagccgctataacggtatcctcaaccagatggggatgaccgccgatcagtacgcccaggcgctgcgtaaccagctcactacccaacagctgattaacggcgttgccggtaccgattttatgctgaaaggtgaaaccgacgagctggcggcactggtcgcgcaacaacgcgtggtgcgtgaggcgactatcgatgttaacgcgctggcggcgaagcagcctgtgaccgaacaggagattgccagctactacgaacaaaacaaaaacaatttcatgacgccggaacaattccgcgtgagttacatcaagctggatgccgcaacgatgcagcaaccggttagcgatgcggatatccagagctactacgaccagcatcaggatcaattcacccagccgcagcgtacccgctacagcatcatccagaccaaaactgaagatgaagcgaaagcggtacttgatgagctgaataaaggcggtgattttgctgcattagccaaagaaaaatctgccgatattatctctgctcgtaacggcggcgatatgggttggttagaagatgccactatcccggacgaactgaaaaatgctggtctgaaagaaaaaggccaactgtctggtgtcatcaaatctagcgtcggtttcctgattgtacgtctggacgacattcagccagcgaaagtgaaaagcttagacgaagtacgtgacgacattgcggcgaaagtgaaacacgaaaaagccctcgatgcgtactacgcgctgcagcagaaagtgagcgatgcggcaagcaacgacaccgagtctctggccggtgcagagcaagctgccggcgttaaagccactcagacgggttggttcagcaaagataacctgccggaagagttgaacttcaagccggttgccgacgctatctttaacggcggtctggtaggtgaaaacggcgcgccgggcatcaactctgacatcatcaccgtagacggcgaccgcgcattcgtgctgcgcatcagcgagcacaaaccggaagcggtgaaaccgttggcagatgttcaggaacaagttaaggcattggttcagcacaacaaagctgaacaacaggcgaaagtggatgctgagaaactgctggttgatttgaaagccggcaaaggtgcggaagctatgcaggctgccggtctgaaatttggcgagccgaaaaccttaagccgttccggtcgtgacccgattagccaggcggcgtttgcactgccactgccagcgaaagacaaaccgagctacggtatggcgaccgatatgcaaggtaatgtggttctgctggcgctggatgaagtgaaacaaggtagtatgccggaagatcagaaaaaagcgatggtgcagggtatcacccagaacaacgcacaaatcgtctttgaagctctgatgagtaacctgcgtaaagaggcgaaaatcaaaattggcgatgcgctggaacagcaataatcctgaagccgcctcgcaaaaaaatgcgttgcagctgtaacaagaaaaggtcgctttcgcggccttttccatttctgaacattgccatttgtttactgttttcactgccgttaaggtgattccactgttaacaaacaaggagaaaacagtatgaaacacggaattaaagcactgctcattaccctgcccctggcctgtgccggaatgtctcatagcgcgctggcggcagcttctgtggcgaaaccgacggcggtagaaaccaaagcggaagctcctgcagcacaaagtaaagcagcagtaccggcgaaagccagtgacgaagaaggcacccgggtcagcattaataatgccagcgcggaagagctagcccgcgcgatgaatggcgttggcctgaagaaagcgcaggcgattgtcagttatcgcgaagagtacggtccgtttaaaactgtggaggatctaaagcaggtgccggggatgggcaatagcctggtggaacgtaatctggcggtattaaccctgtaattaatttgcatagtggcaattttttgccagactgaagaggtcataccagttatgacctctgtacttataacaacaacgtaaggttattgcgctatgcaaacacaaatcaaagttcgtggatatcatctcgacgtttaccagcacgtcaacaacgcccgctaccttgaatttctcgaagaagcccgctgggatgggttggaaaatagcgacagttttcagtggatgacggcccataacatcgccttcgtcgtggtcaatatcaatattaactatcgtcgcccagcggtattaagtgacctgttaactattaccagtcagttgcagcaattaaacggtaaaagcggcatcttaagccaggtcattacactggagccggaagggcaggtggtagcggatgcgcttattacgtttgtttgtattgatcttaaaacgcagaaagcattagctctggaaggggaattgcgcgaaaagctggagcagatggttaagtaaacgttttgtggtgccggatgctcaagccgcatccggcgacacccggaataattacctcaacccggttttctgcttcatcgctgccatcaccgtcggtttatcggccagataatgattcaaaccgttggcgcgtaaattacatgccgcacaatgaccgcaaccgtcgcctttaaagccgttatagcaggtcaacgtttcgttacggactaaatccagtttgccgtaataatctgccagcgcccaggtttccgctttatcaatccacatcagcggcgtttcaaaacgaatatctttcgccatgcccaaactgacggcatggtttagtgctttcacaaactcatcgcggcaatccgggtagccggagaaatccgtttcgcagacgccagtaattacggcttctgcttttacctgatacgcatatattgccgccagcgtcaggaacaaaatattacgccctgggacaaacgtattcgggataccatcggcttcaggttcataatcaggcaccggaatgctgtcacgcgtcaggctactgaccgccagctcgttgagcagggtgacatccagcaccttatgcgcgcgtgcccccagtttcagcgccagttcgcgtgccacgtcgatttctgcgcgatgccgctgaccgtaatcgaacgtcacgcaatggacttcatcatattgttgtaatgcctgcaccagacaggtggtggaatcctgacctccactgaacacaacgacagcacgtttcatagataatcctgcttgaacaataaaagcgttatggtaacgcctgcgattaacccggaccagctattcattggcttggcgcgggaagccaggcttcggtaaattcaaaccagccgcgcggtgtcagtcgcacaccgttcacgccgggaggggcactaatgcgatagtgatagttgaacagcggcgtcagcgtcgcatctgtcattaactggctaaaaaccgctttcagggcattaaatcggttttcttcatcaggcattatttgcacggcatccagtgtgctttgtagatgtgcgtatgctggagcgtcgaaaacatgtggccacagcggatcgcagcgcagccattgctccagagtatattccggtgcttcgccaattaatctgtcgcccatcatgaggtctgcgtgtgcctgtagggtcgtgtcgtcccagttttttgcgttatgaaaaataattgtgagttcacagccttccgctgccagtgtcgcctgtaggcgttctgccatggtatgaagttctatcggtaggtgataaaccagcgtcaaggttttcggtagtttgacttcatccggtacctgccaatgcggaatagtccagcctggcagtaatgcatgactggcggtgatcaggttttctccgacttctaacgtttgtaataaaccggattgatgaataatggagatcacttttcgcgcctgccagagggagagtcggggacttttgcgcaacgtcaaatagcaaaaacctaaactgatgccgctactgacctggctgacccgttgcagctcctccggtttgccgatggtgatttgcacgggatgccgacaactggttcccaaatctttttcgaaaagcggcggagttatccagtactcaaccgctttaagcagcggatgacgtaaatggtaataatcatggctttccaggcgcaccagctctgctgtgaattgtgttaagcgaaaaggacccgtgccgatcagtgggaattgcggatgcgccagatggctgcaatagctcgccagccggtgcgcaagccagtaatcagggcgatgtaaaaagaaggtcagacactgcggatgggtgacttcaatacgcttcacgctaataaataattgatccagtgctggcagttgtaacagcatcaataatcgctggtgtaagtgactggcttttactgcatcgccgttatgccagtgtagggtactacgaagataaaagtcccagcgtaacccgtcagtagaggtttcccagtgatgcgctaaatcgccaatcgggcgctgagtattattatcgaagcgggtcaggccggaaaatatctgcccggcgagatgctgctcggcacggccgggcaaaaagcctggttgtagcggttcgagcgggcgatagtagggaatacgcaacgtgggtgtatcgttttgccattgtccgcccataaacggctgtaacagagtgcgcagctcacctggggccagttgcgccagctccagcacatcttgctgctttccggtttccagtgcctgttccatcatcgcattgcgtaggctttccggcgtgaccagaaagcgtaattgtccgcgctttccgcgtccactctgcgcctgccactccagccatcccgcctcctgtgcctgacgcaacagcgtacgaacatggcgttcgctgcaaaaacagcgttcggccagttcgctgacggtgacggtttgcggctttccggcggaaggttgccacagacgttgatactggttaagacggttgagcaatcgcatataaacccggaacaatattatttaactattcactattacttccgtatatatcaggtgatactcaatcaccattaaccgtgtcacagagtggagaaagaaatggctcgtctggcagcatttgatatggatggcactttattgatgcccgaccatcatttaggtgagaaaaccctctctactttggcgcgactgcgtgaacgcgacattaccctcacttttgccacggggcgtcatgcgctggagatgcagcatattctcggggcgctaagcctggatgcgtatttgattaccggcaacggaacgcgcgtgcattctctggaaggtgaacttttacatcgtgatgatttacctgcggatgtcgcggagctggtgctgtatcagcaatgggatacccgagccagcatgcatatcttcaatgacgacggttggtttaccgggaaagagatccctgcgttgttgcaggcatttgtctatagcggttttcgttatcagataatcgatgtcaaaaaaatgccactcggcagcgtcaccaagatctgcttctgtggcgatcacgacgatcttacacgcttgcagatccagctatacgaagcattaggcgagcgtgcacatttgtgtttttccgccacggattgcctcgaagtgctgccggtgggctgcaataaaggcgctgcattgacggtgctgacccaacatttaggtttaagcttgcgcgattgcatggcctttggtgatgcgatgaacgatcgcgaaatgttagtcagcgtcggtagcggatttattatgggcaatgcgatgccgcaactgcgcgcggagctcccgcatttaccggtgattggacattgccgaaatcaggctgtctctcactatttgacgcactggctggactatccacatctaccttattcccccgaataacgagatcccttccagcaccgggcaattgcccggttttttttgcgttgaatttgtcattttgtgccgtggtgtttaaaccgcacagaataaattgtcgtgatttcacctttaaaataaaattaaaagagaaaaaaattctctgtggaagggctatgttagataaaattgaccgtaagctgctggccttactgcagcaggattgcaccctctctttgcaggcactggctgaagccgttaatctgacaaccaccccttgctggaagcgcctgaaacggctggaggacgacggtatccttatcggcaaagtcgccctgctggatccggaaaaaataggcctcggcctgaccgcttttgtgctgataaaaacgcaacatcacagcagcgaatggtattgccgctttgtcacggtggttaccgaaatgccagaagtgctggggttctggcgcatggctggtgaatacgattatctgatgcgcgtccaggttgccgacatgaaacgctacgacgagttttataagcgtctggtaaacagcgtgccggggctgagcgacgtcacttccagcttcgcgatggaacagattaaatacaccacttctttacccatcgaataaatatccagaatcaggtcaggacacaacgcgtgcgattatttgctcaattaagctggtatttccgtcgggaatggcgtcgctatctcggggctgtcgccttgcttgtcattatcgcgatgctgcaactggttccgccaaaagtggttggtattgttgtcgatggcgtgacagaacaacactttactaccgggcagatcctgatgtggatcgccaccatggtgctgattgccgttgtggtttatctcctgcgttacgtctggcgggtattgctgtttggtgcgtcttatcaactggctgttgaactgcgtgaagattattaccgtcagctaagccggcagcatcctgagttttacctgcgtcatcgcaccggtgacctcatggctcgtgcgaccaatgacgtcgatcgcgtcgtgtttgccgccggagaaggggtgctgacgctggtggatagtctggtgatgggctgcgctgtgttgattatgatgtctacgcaaattagctggcagttgaccttattttccctgttgccgatgccagtgatggcgatcatgattaagcgcaacggcgatgctttgcatgaacgctttaagctggcacaggcggcgttttccagtcttaatgaccgcacccaggaaagcctcaccagtatccgcatgatcaaagcctttggtctggaagatcgccagagcgcgttatttgccgcggatgccgaagataccggcaaaaaaaacatgcgggtggcgcgtattgatgctcgtttcgacccgaccatctatatcgcgattggtatggcgaacttgctggcgattggcggcggtagttggatggtggtgcagggcagtttaacgctgggccagctcaccagttttatgatgtatttaggtctgatgatttggccaatgctggcgctggcatggatgtttaacattgtggaacgtggtagtgctgcgtacagccgtattcgcgcgatgctggcggaagcgccggtggtgaacgatggtagcgaacccgtgccggaagggcgtggcgaactggatgtaaatattcaccagttcacgtatccgcagactgaccatcctgcgctggaaaacgtcaatttcgccctgaaacccggtcagatgctgggtatctgcgggccgactggttccggcaaaagtaccctgttgagcctcattcagcgtcatttcgacgtcagcgagggggatattcgctttcatgatattcctctgacgaagttacaactcgatagctggcgtagccgcctggcggtagttagccagacgccattccttttttctgacactgtggcgaataacatcgcgctgggttgcccgaatgccacccagcaagagattgagcatgtcgcgcggttagccagcgtacatgacgatattttgcgtctaccgcaaggttacgatacagaggtgggcgagcgcggtgtgatgctttccggcgggcaaaaacagcgtatctccattgctcgtgcgttattagtcaacgcggaaatcctcatccttgatgatgcgcttagcgcggtggacggacgcactgagcaccagatcctgcataacctgcgtcagtgggggcagggaagaacggtaatcatcagtgcccatcgcctttctgcactgacggaagccagtgaaattattgtgatgcagcacggacatatcgcccagcgtggcaatcatgatgtgctggcacaacaaagcggctggtatcgcgatatgtatcgctatcaacaactggaggcggcgctcgacgacgctccggaaaatcgcgaggaggccgtcgatgcgtaactaaaaatcgcgaggaggccgtcgatgcgtagttttagccaactgtggccgactctcaagcgcctgttagcgtacggtagcccgtggcgtaaaccgctggggattgcggtcctgatgatgtgggttgcggcggcggcagaagtcagtgggccgctgcttatcagctattttatcgacaatatggtagcgaaaaataacctgccgttgaaagtggttgcagggctggctgcggcgtatgttgggctgcaactgtttgccgccgggctacattacgcgcagagcctgctgtttaatcgggcggcagtaggcgtagtgcaacagttgcgtaccgacgtgatggatgctgcgttacgccagccattaagcgagtttgatacccaacccgtcgggcaggtgatttcccgcgtcactaatgacactgaagtgatccgcgatctctacgttaccgtagtggcaactgtcctgcgcagtgccgcgctggtgggcgcgatgctggtggcgatgttcagcctcgactggcgaatggcactggtggcgataatgattttcccggtggtgctggtggtaatggtgatataccagcgttacagcacgccgattgtccgtcgtgtgcgcgcctatttggcggatatcaacgacggctttaacgaaatcatcaatggcatgagcgttatccagcagtttcgtcagcaggcgcgatttggcgaacgtatgggggaggccagtcgtagtcactatatggcgaggatgcaaaccctgcgcctcgacggttttctgctgcgtccgctgctgagtctgtttagtagcctcattctttgtggcttgttgatgctgtttggcttctccgccagcggcaccattgaagtgggcgtgctgtatgcgtttatcagctatcttgggcgacttaacgaaccattaatcgaactgaccacgcaacaggcgatgctgcaacaggctgttgttgctggtgagcgcgtgtttgaactgatggacggaccgcgccagcaatatggcaatgatgatcgcccgttacagagtggcaccatcgaagtcgataacgtgagttttgcttatcgcgatgacaatctggtgctaaagaacattaatctctctgtgcctagccgcaattttgtggcgctggtcgggcataccggcagtggcaaaagcaccctcgccagtttattgatgggctattacccgctaacggaaggtgagattcgccttgatggtcgtccattaagtagcctaagtcacagcgcgctgcgccagggcgtggcaatggtgcagcaagatccggtggtgctggcggataccttcctcgccaacgtgacgctggggcgggatatctccgaagaacgcgtctggcaggcgctggaaaccgtgcaactggcggagctggcgcgtagcatgagcgacggtatttacacgccgctgggcgagcaggggaataatctcagtgttgggcaaaagcaactgctggcactggcgcgcgtgctggtcgagacgccgcaaatcctgatccttgatgaggcaaccgccagcattgactccggtactgaacaggcgattcaacatgctctggcggcggtgcgtgaacataccacgctggtagtgattgctcaccgcttaagcaccattgttgatgccgacaccattctggtgcttcatcgtgggcaagccgtggagcagggcactcaccagcaactgctggcggcccagggacgctactggcagatgtatcaactgcaacttgcgggcgaagagctggcagccagcgtgcgtgaagaggaaagtttgagcgcctgaatagcgcaatatttcatcgttggtgcaaaaatgtaacgcactgtgcactgtcatagtgcgttttcattttcaaacttcttaacttcctgctctctttctcgtttttcatttctggcacaccgcttgcaataccttcttcgtgtagcagaaccattaccgaattctgaccggaggggatctatgaagctggtgaccgtgataatcaaaccattcaagctggaagacgttcgtgaagcgttatcttccattggtattcagggcctgaccgtcaccgaagtgaaaggtttcgggcgtcagaaagggcatgccgagctgtaccggggggcggaatacagcgtcaatttcctgccaaaagtaaaaattgatgtggcgattgctgatgaccaactcgatgaagtgatcgatatcgtcagtaaggcggcttacaccggaaaaattggcgacggcaaaatcttcgtcgctgaattgcaacgcgtcattcgtattcgtaccggcgaagccgacgaagcggcgctgtaatctctggcacacagcaacaggaacgaaaaatgaagatagcgacgataaaaactgggcttgctagtctggcgatgcttccgggactggtaatggctgcacctgcggtggccgataaagccgacaatgcgtttatgatgatttgtactgcgctggtgctgtttatgactattccggggattgccctgttttacggtgggttgattcgcggcaaaaacgtgctgagcatgctgacgcaggtgacggtgacatttgcactggtctgtattctctgggtggtttacggttacagcctggcgtttggtgagggcaacaacttcttcggcaacattaactggttgatgctgaaaaacatcgaactgacggcggtgatgggcagcatttatcagtatatccacgtggcgtttcagggaagctttgcctgcattaccgtcggcttgatagttggggcgctggcggaacgaatccgcttcagtgctgtgttgattttcgtggtggtatggctgacgctctcttacattccgattgcgcatatggtgtggggcggtggtttgctggcttctcacggtgcgctggatttcgcgggtggcaccgtggtgcacattaacgccgcaatcgccggtctggtgggcgcgtatctgataggaaaacgcgtgggcttcggtaaagaggcgtttaaaccgcacaacctgccgatggtcttcaccgggactgccattctctatatcggttggtttggctttaacgccgggagtgcgggcacggcgaatgaaatcgcggcactggcatttgtgaatactgtggtcgcaacggcggcggcaattcttggctggatcttcggtgaatgggcgctgcgtggtaagcctagtctgctgggggcgtgttctggcgcgattgccggtctggtcggcgtgacgccagcctgcggctacattggggttggcggcgcgttgattatcggcgtggtagctggtctggcgggcttgtggggcgttaccatgctcaaacgcttgctgcgggtggatgatccctgcgatgtcttcggtgtgcacggcgtttgtggcattgtcggctgtatcatgaccgggatttttgccgccagcagcctgggcggcgtgggcttcgctgaaggtgtgacgatgggccatcagttgctggtacagctggaaagcatcgccattacgatcgtctggtccggtgttgtggcatttatcggctacaaattggcggatctgacggttggtctgcgtgtaccggaagagcaggagcgagaagggctggatgtcaacagccacggcgagaatgcctataacgcgtaacaagcactgcaaaaaacagccggacggttttcacctccggctatttttttaattgtgattacgcatcaccccttcctgaacggtgctggcaaccagtacgccgtcttgggtataaaactcaccgcgcacaaagccacgtgcgctggacgcgctggtgctctccacgctatacagcagccattcattcaaattaaacgggcgatggaaccacatggaatggtcaatggtggcaatctgaatccccggttcgagaaaaccgatgccgtgcggctgtagagctaccggcaggaagttaagatcagaagcgtaaccgagcagatactgatgaacgcgcaggtcatccggcacgctaccatttgcgcggatccacacctgacgatgtggttctgcgacgtgacctttcagtgggttatgaaactccaccggacggacttccagcggacgatcgcagatgaatttatctttcagcactggcggcagcaggtgcgccaggctttgggcgatttgcgtttcgctagggaggccatcaggcgctggcgcggacggcattgttttttgatgttcgaaacccgcttctggtgcctggaaagaggcagtcatataaaaaatcggtttgccgttttgaatagcagcaacccggcgggcgctgaagctgttaccgtcacgcagcgtttcgacatcataaataatcggcttcttactatcgccagggcgaagaaagtagctgtgaaagctatgtaccagccgctcttcagggacggtctcttttgcagcatacaaggcctgacccacgacctggccgccaaacacctggcgtaaacctaaatcttcactctggccgcgaaagagtccttcctcaattttttccagatttaacaatgtcagtaaattttttagcgcctgactcatataactctccagtaacaaagctgccgcagcaagccaaagtgagttgagtataacgcaaatttgctactggtccgatgggtgcaatggtctgaattacgggctaattacaggcagaaatgcgtgatgtgtgccacacttgttgacgttactattttgttaaccactcttccggcgaggaaagttagcccgctggtgcattgataataaggagaaatgaatgaaactcgtgcacatggccagtggtttagcggttgcgattgcgttggcggcttgcgcagataaaagcgcggatattcagacgccagcaccggctgcaaatacgtctattagtgcaacacaacaaccagctatccagcaaccgaatgtctccggtaccgtctggatccgtcagaaagtcgcactgccgcctgatgctgtgctgaccgtgacactttctgacgcgagcttagccgatgcaccgagtaaagtgctggcgcagaaagcggtgcgtactgaaggtaaacagagtccattcagctttgttctgagttttaacccggcagatgttcagccgaacgcgcgtattctgttgagtgcggcgattaccgtgaatgacaaactggtatttatcaccgataccgttcagccggtgatcaaccagggcggaactaaagccgacctgacattggtgccggtacagcaaaccgccgtgccggttcaggccagcggtggcgcaacgactaccgtacctagcactagtccaactcaggtgaatccgtctagcgcagttccagctcctacgcaatattaagcgacgttaaccctctccgcccggagagggttagtagttccagcgataacgctgcaagtcgatttgcccgcttccgcttaccatcacaccttctgccagtaatgcctgtcgctgacgctgtaaatccggtccggttaggctaattgtgccgtggcgattaaccacccggtgccagggtaaggtgctgccttcagggagacgctttaacacaccgcccacctggcgcgcggcgcgggggcttcccgccagtttcgccacatcaccgtaagtggtgacatagccttcgggaatagcggcgacgatttgccagacgcgttggggaaaactatcttctttttccatcttttcttcctgaggtaatttttcagcataatctggaaaaacgccgctgtgaagtcgcattgcgcaagaaaccagcatctggcacgcgatgggttgcaattagccggggcagcagtgataatgcgcctgcgcgttggttctcaacgctctcaatgggggctctgttggttctcccgcaacgctactctgtttaccaggtcaggtccggaaggaagcagccaaggcagatgacgcgtgtgccgggatgtagctggcagggcccccacccatttctgcctcccaccgtttcgtcaaaaaatcccaacatggctaaactttaaccacaactgacgtcgcaagaattgtctggctgcgcagtacgcttcggaggtatgtctgatgaagtatgttgatggttttgtggttgccgttcctgccgataaaaaggatgcctatcgggaaatggccgctaaggctgcgccattgtttaaagagtttggcgcgcttcgtattgtcgaatgctgggccagcgatgtaccggatggcaaagtgaccgattttcgtatggcggtgaaagcggaagagaatgaagaggttgtctttagctggattgaataccctagtaaagaggtccgcgacgctgctaatcaaaagatgatgagcgacccacggatgaaagagttcggcgagtccatgccgtttgacggcaagcgaatgatctatggcggattcgagagtatcatcgacgaataagtagcgtgacgggctgtgcggcgtgccgtcagcccaaaaattcacaaatgttgctcggcccagcgtaagaaatcttctttcggtaatgccttgctgtagagccagccctgaccgtagtgcacgccatgctggcgtaaccactcttcttgtttactggtttcgattccctccgctaccattttcagtttcagtgtttttgccatttcgatgatatgcggcgtgacatttttatattccagcgcatcaacgaaagatttatcgatcttcagaatgtcgacatccagatcctgtaaataacttaaactactataccccgtaccaaaatcatcaagataaatttcatggcccgcctcccggtagcgagaaattatcggggcgctggttttcggatcggcaaactcgcgttcagtgagttcaagcgcgatctgtctgggattaacctgatagtgattgatcatgtcacgcagcaattgcgggattttttcgctggtgagcacgggggattcaagattgatgctaatatgctgctgtggatgctgacgcagccagtcgcccatatcttcaaagacgcttcttataatcagtagcgtcaatggctcagaaaggcccgtttgctgtgccagcggaataaaactatctggactcaaccaactaccgtctgtctgcggccagcgcgccagtgcctcagcaccgacaattttgccattggctaaggagacaatcggctgatagtgcacgcaaatatcacgattttcgatagcatcctgcagccgatgatgcggactctgaatacggcgcaaaatacgcagcacaaacatcgctgccagcaggccaatcaccaacccgagcggtaaccaaataaagacttgccgatgccagcctttctgcaacattttcgtactagcccatgtgatgatgctaatattcatctccggtaagggcaggatatcgtaaatgattccattattttcgatatgctcaccgggtgttttttgtagcctggtaataattccctgagcaatttcatcgctgctggttatgacaacgttatgggcattgccaataatggcggcatcaatttgccaactgctatagggaatgacatcaataaaggaagcggggtcgatcatgacgacataatgtgccgttcccatggcgaccatgtaacggataatgcctaaatcgttatggcttgttaaccagacacgataaccatctttgctaattttacctggctcggggaaggtatcgggcggactttcatgctccagagagctacactggggaacgttgttatcgatataagccacttcctgaatatagcgataactgtaagatacccgacgcatttccatgagatgggcttcgctacaggcagcgccttgccatctttccagctcctgcagcgcatctttcccttgtgtcgccaccttattggctcgaatagcgacgcgggaggaataggtatccagctcttcaataaagcttgtttctacctgctgatgggccagccagatgcttaagccgacaggcagcaatacactaagaatcagtactccgctaataaggccgaccagatgtcgtgttctcaccagcatatccttattaacacagtgtagggaaagtatatctgattgtggaaaaaggctggctggagataaggaggtagagctggtatttcatgaagtgatgggtggaaacgatcattgtcatttgaccaggcgcagagctttacgcctggtatgtaaccctaacttaagatgtactttcggcgcgagcgagggtaaaaatatcgtaaaaagacagttcacctttacggacgatcattttttgcagttgttccttatgaacatccgcgacacgcggagagttcaagatggcttcaaccagcgcggcaggtacaaagcgcgtgttgtaccattcgccgttatagcaaacgcggaaatccagcacgtcgatatcttcatagcggtagcgtgggtagacatcgaaaaagaagaaaccattaagcaggataaataatacaaccagtagccagacagagccactcagcgtttcggactgcaacatcaccgccagggtggcaaaaaaagcaacgtacataccgataaacagccccggatgtttacggataaaactgatactaaagcggggtttgttgtcgcgtttttcgcgggtattcagagactcaatcgtttcggtcagcaggcgttgtatttcggtcatcgtttgccttcgtggtatctgcaactttccagggaacaccctattttaacgtgggaatagtagaggggaagtaacagatctaccacaattttgcataacagttgcgaaaaaccgattacaattttttaattattctggctggattaccgcccacgacaacgttgtccgggacatcttttgtgacaactgcaccactggctaccacgacgttatcaccaatggtcacaccagggttaatgaccgcgcgtccgccaatccagacgttattaccgatggtgacgggtttccccagttcagcaccgctattacgtgctacagggtcgatgggatgtgttgccgtgtagatatgaacgcctggtgccaacatacagttatcaccgatgcgaatagggcagacatcaagcatcacgcaatcgaagttggcgaaaaaattattaccgagaaaaatgttatagccatagtcacagcgaaacgttggctcaatataagcctctgtcacctgaccgaatagatcagcgagaatttgctggcgtaatgtgtgctcttccgccagggaatgattgtatcggtgaataagctgacgagcgcgcaggcgatcgcgagataacgtctcatctgcgctgcgatacaactcaccagcaatcatcttttctttttctgtgctcattactgacctccggttgctgaaaatgcggcaacacagtaagacgaaaagtcagtgaagagaacgttcccattacatctgtgtgataaagatcacatagggtatgtcttcatggcgaaaaagtataaaattcttaataaacagccggttatagctccgaaagcgaattatttattagcgaataaatttccatacactggaagggatcttgtcgtacagtttattcatggtcaattcggcgaggcggtgatctgcggcactgtaaaataccgccagttcattatcacttaattcgtatttatttttctcgataacacgctccagcgtgtcaattgtctggcaacgacgtaaacgcattaaataatcggttttcgttaaaggtttttcggacatacttctacctatggttgtaataattttaacaagataaactcgcaggattctctttcgtcgcattgacaaaacaacggaatagtcgattaccactcttccgccatttctgaagatcctgcatattaataccataactactgaacaacataaaggtgtcatccagatattcgtcgatctgctcaatgagcttattgtcttcattatacttaattttgtaattaagtgcgaaggtcgcaatatgctcaatcagttcattcaactggaggttgatcgcgctggttgggtcgtttacccagccatgattgctttcttcaaggtttgcaaggcagtcatgatacagggtttcacagagaaacttaagctgtgcgatatcatgtcttttgggactgtattcatccataacgcgtccccttcttagcggttgaactaacggacacctttcgggatggaaaaaacttactgacctggacttgccctctcgtttgttagcttaactataagccactctttgcaggttttcatcgcattattacgaaaaattacaattaggaaggaagcgggacaggactcactttttcatactagcactaacccgcagcaggtaaaagcagtttgctcgaactattcataacatttcaggattatcgccagatgaaattggtgacactaataccaggattgctctgaatatgacgtaataaccgaggaatgaataaagaattaccgcaaataattaagaatagcctctaaatgattatggattattaaatctattagcgctacttaatataaattaactaacaatcagtattttttatgaattttatccgtggttaatactggttttcgtatgagatcctgagttggtggttcaattactccttaatgttcgtaggttatgcataaaaaaggccgcttacgcggccttagtgattacacgttgtatcaatgatgatcgacagtatggctgtgctcgatatcttcattcttgcggctaaagcggcggcgaaccaccacaaagaataccggaacgaagaagattgccagtaccgttgcggtcaccatcccgcccattacaccggtacctactgcgttctgcgcgccggaaccagcaccagtactgataaccagcggcataacgccgaggataaacgccaggctggtcatcaggatcggacgtaaacgcatccgcaccgcatcaagcgtcgcttcaatcagacctttaccttctttatccatcaagtctttggcgaattcgacgataaggatcgcgttcttcgcgctcaacccaatggttgtgagcaggcctacctggaagtaaacgtcattggtcaggccacggaaggtggcagccagcaacgcaccgataacccccagcggaacgaccagcataacggagaacggaatgctccagctctcgtacagcgccgccagacacaggaacacgacaatcaagctaatcgcgtacagactaggtgcctggttgccggagagacgttcctgataggacatccccgtccagtcatagccaacaccggtaggcagtttgctcgccagttgttccatcagctccattgcttcaccggtacttttacccggtgccgcctggcctaagatttccatggatggcaggccgttgtaacgttccagacgcgggctaccgtactcccaacgagaagaggagaacgcgctgaatggcaccatctgaccatcagcagcacgaacataccagtcgccgatatcatccggcagcatacggtatttcgcttcactcatgacataaactttcttcacacgaccgcggtcgataaagtcgttcacatagctgccgccccatgcagcgcccagagtggtgttaatgtcgttgatagaaacacccagcgcctgcgctttttcctggtcgatatcaatcttaaactgcggggtatcttccagaccgtttggacgtacgctggtcaacatatcagggtgcttcgctgcttctgcaagcaactggttacgcgcctgagtcagtttttcgtgaccaaggccagcctggtcaatcagctcaaagtcaaagccggttgcagtacccagttccacgattgcgggcaggttaaaggcgaaaaccatcgcatctttgatttggctgaaagcgcgtgttgcacgcatggtaatcgcttcaactttgttttcttcgcccggacgatcggcccagtccttcaaggaaacgaacgcaataccggtattctgaccacgtcccgcaaagccgaagccgttaacggcgaacacgctctcaacgttgttcttttctttggtcagatagtaatgcgttacctcattgagcactttctgtgtacgttcctgcgttgcacctgctggcagctgaaccatggtcataaacacgccctggtcctcatctggcaagaaggagcttggcagacgcacgaacagataggccatgccgaccacgatgatcagatacagcaccaggtaacgccccgtactgcgcagaataccgcctacgctgtcggtgtagtggtgcgtgctcttctcgaacatgcggttaaaccagccgaagaagccttttttaccttccccgtgatcgcctttggcaatcggtttcagcatggtggcacaaagagctggagtcaggatcaacgccaccagtacgctcagcgccattgcactaacaatggtaatagagaactgacgatagatagcaccagtagaaccgccaaagaaggccatcggtacgaataccgcgctcagtaccatcgcgataccgaccagagcgccctgaatctgccccatgctcttacgggtagcttcttttggcggcaaaccttcttccgccataacacgctcaacgttttctaccacaacgatggcgtcatccaccaacaggccgatggcgagcaccatcccgaacattgttagcgtgtttatgctgaagccaaaggcggcaaggacggcaaaggtcccgagcaataccaccggtacggcaatggtcggaatcaacgtcgcgcggaagttctgcaggaacagatacataaccaggaacacgaggatgatcgcttcgaccagcgttttaaccacttcgtgaatagagattttcacgaacggcgtggtgtcgtatgggtaaacaattttcagaccgctcgggaagaacggttccatcttcgccagttcagcacggattgccgcagcggtatccagcgcgtttgcaccggtcgccagcttgatccccagaccggaagccggttggccgttaaactctgcgatgatgtcgtagttctcaccacccagctcaatcttcgcgacgtcacgcagcagcacgcgggaaccatcctgattcactttcagcaggattttgccgaactcttcagtagaggtcagacgcgtctgagcaataatagaggcgttaagctgttggcctttcaccggcggcgtaccaccgagctgacccgccgcaacctgggcgttctgcgctttgatggcggtaatgacatcaaccggcgttagctggaatttgttcagctcattcgggttcatccagatacgcatcgcgtactgactaccgaacaactgaacatcacccacgccgctcgtacggctgatggcatctttcatattcgccgccacgtagtcggagatatcctcctgcgtcatggtgccatcggtgttgataacgccgacaaccatcaggaagctgctggaacttttctcaacgctcaccccttgctgctgaacttcttgcggcagcaacggcatcgccagctgcagtttgttctgcacctgaacctgcgcgatatccgcatcagtaccagactcaaaggtcagggtgatctgcacggtacccgtggagtcactgttagaggacatgtacatcaggttatcgataccgttcatattctgttcgataacctgtgtcaccgtgtcctgcactgttttcgcatcagcgccggggtaggaggcggagatcgttactgccggcggtgcaatcgtaggatgttgcgccaccggcagtttgaggatcgccagcccccctgccaacatgatgataatggcgatcacccacgcaaaaatcgggcgatcgataaagaaattaggcatgtcttaacggctcctgtttaagttaagacttggactgttcaggctgagcaccgcttgcggcttgctggttattatcagcggtaacttcttgtgcttttacctggacaccaggacgcactttctgcagcccacttattactacgcgatcgcctgctttcagaccttctgtcaccagccacttatcgccaatagcctggcttgcaacgatcggacgggtttccactttgtcatccgcgccaactaccagtacggtggcatcgccacgcggcgtacgggttacgccctgttgcgggactaaaatagcgtttggattaagcccttcttccagacgtgcgcgcacgaacatacccggcagcagagtgtgatccgggttcgggaagatagcgcgtagggtgatagacccagtggtctgatcaacggtaacgtcagagaattccagcgtaccgtcctgcgggaacttaatgccgtcactggtgatcagactcactttggctttgccgttctcttgtttcagcgtgccattcgccagttcctgtttcaggcgcaggaagtcgttgctggactgggtcacatcaacgtagatcggatcaagttgctgcacggttgccagcgcagtcgcctgaccgttctgtaccaatgcgccttccgtcacgttgctcttaccaatgcgaccgctaatcggagaggtgactttggtgtaagccagattgatccgcgcagtttcaacggcagctttcgccgcagttaccgcagcattcgcctgttgcgcatcagccagagcctgatcgtactcttgcttactgatgtactgagtaccgagcagtttctgataacgattcaccgtcaattgcgcgatattggctgcagcctgggctttcgccagatcacctttcgcactgtcgtatgtcgcctgataggtcgcaggatcaatctgatagagagagacacctgcttcgatgtcgctaccttctttgaaattacgcttcaggataatcccgctaacttgaggacgaacttctgcgatccggtaggcactggtgcgacccggaagctcggttgtgatctgcagaggttcagttttgactgttactacgccaacggcgggcatctgctggccaccttgttgggcctgtttgtcgtcacatcctgttagggctaagctgccactgagcatcagaacgaccgccagaggcgtaaaccctctgtttttgttcatatgtaaacctcgagtgtccgatttcaaattggtcaatggtcaaaagttaataaacccattgctgcgtttatattatcgtcgtgctatggtacatacattcacaaatgtatgtaaatctaacgcctgtaaattcacgaacatatggcacgaaaaaccaaacaagaagcgcaagaaacgcgccaacacatcctcgatgtggctctacgtcttttcagtcagcagggggtaagttccaccagcctgggcgagattgcaaaagcagctggcgttacgcgcggtgcaatctactggcattttaaagacaagagcgatttgttcagtgagatctgggaactgagtgaatccaatattggtgaactagagcttgagtatcaggcaaaattccctggcgatccactcagtgtattaagagagatattaattcatgttcttgaatccacggtgacagaagaacggcgtcgattattgatggagattatattccacaaatgcgaatttgtcggagaaatggctgttgtgcaacaggcacaacgtaatctctgtctggaaagttatgaccgtatagaacaaacgttaaaacattgtattgaagcgaaaatgttgcctgcggatttaatgacgcgtcgcgcagcaattattatgcgcggctatatttccggcctgatggaaaactggctctttgccccgcaatcttttgatcttaaaaaagaagcccgcgattacgttgccatcttactggagatgtatctcctgtgccccacgcttcgtaatcctgccactaacgaataaccctgaatctgactccaggatttttcctggacattttcgtcgttgctattctggttcactgcgtcgtgatattcttgcggtttgactttttcaggtcgttcttcaggttcagaaaccttcattcatcatgactatgttccagtattacaaacgaagtcggcattttgtttttagtgcatttattgcttttgtttttgtcttgttatgccagaacacggcgtttgcgcgggcgagtagcaatggtgatctgccgacaaaagcggacctgcaggcgcaacttgacagtctaaataaacaaaaagatctttctgctcaggacaaactggtgcagcaggatctgacagatacattagccaccctcgataaaatcgatcgcataaaagaagagacagttcagctacggcaaaaagtcgctgaagcgccggaaaaaatgcgccaggcgaccgcggcgttaacagcacttagcgatgtcgataacgacgaagaaacgcgcaaaattctgagcacgctgagcttgcgccagctggaaactcgcgttgcccaggcgctggacgatttgcaaaacgcacaaaacgatctggcgtcttataacagccagctggttagcttacagacgcagcccgaacgcgtgcaaaatgcgatgtataacgctagccagcagctgcaacaaattcgcagtcgtctggatgggactgatgtcggcgagacagccttacgtcccagccagaaagtgttaatgcaggcccagcaggcgttgctgaatgcggagattgaccagcagcgtaaaagcctggaagggaacaccgtcttgcaggataccttgcaaaagcaacgtgattacgtgacggcgaacagcgctcgtctggagcaccagttacaactgttgcaagaagcggtaaacagcaagcgcctgactttaaccgaaaaaacggcgcaggaagccgtctccccggatgaagccgcgcgtattcaggctaatccgctggtgaagcaggaactggaaattaaccagcagttaagtcagcgtctgattaccgcgactgaaaacggtaatcagttgatgcagcaaaacattaaagtcaaaaactggctggagcgggcgctgcaaagcgaacgcaatattaaagagcagattgccgtcctgaagggcagcctgctgttgtctcgtatcctttaccagcaacaacaaacgctgcccagcgcggatgaactggaaaacatgaccaaccgcatcgcggatttgcgtctcgaacagtttgaagttaaccagcagcgtgatgcactcttccagagcgatgcgttcgtcaacaaactggaagaaggtcacaccaacgaagtcaacagcgaagttcacgatgcgttattgcaagtggttgatatgcgtcgcgaattgctggatcaactcaacaaacagttgggtaaccagctgatgatggccattaacctgcaaatcaaccagcagcagttaatgagtgtgagcaaaaacctgaaatccatcctgactcagcaaatcttttgggtgaacagtaaccgtccaatggactgggactggatcaaagcgttcccgcaaagcctgaaagatgaatttaagagcatgaaaatcacggtgaactggcaaaaagcctggcccgccgtttttatcgctttcctcgctggtttgccgctgctgttgattgccgggctgatccactggcgtctgggctggctgaaagcgtatcaacaaaaactggcttccgctgtgggttccctgcgtaacgacagccagctcaacacaccaaaagcgatccttatcgacctgatccgtgcgctgccggtgtgcctgattattctcgcggttggcctgattctgttgaccatgcagctcaacatcagcgaactgctatggagcttcagcaaaaaactggcgatattctggctggtgtttggcctgtgctggaaggtactggagaaaaacggcgttgccgtacgtcacttcggcatgccggaacagcagaccagccactggcgtcggcaaattgtccgcatcagtctcgcattgctgcctatccatttctggtctgtggtggcagaactttccccgctgcatctgatggatgatgtgctggggcaagcgatgattttcttcaacctgctgctgattgccttcctggtatggccgatgtgccgcgaaagctggcgtgataaagagagccacaccatgcgactggtcaccattaccgtgctgagcataatcccgattgcgctgatggtgctgactgctacaggctacttctacactacgctgcgtctggcaggacgctggattgaaaccgtttatctggtgatcatctggaacctgctgtaccagacggtactgcgtggcttaagcgtagcggcgcggcgtatcgcctggcgtcgtgcgctggcgcgtcggcagaatctggtgaaagagggcgcagaaggtgctgaaccgccggaagaacccaccattgcactggagcaagttaaccagcagacgctgcgtattaccatgttgctgatgtttgcgctgttcggtgtcatgttctgggcaatttggtccgatttgatcaccgtgttcagctatctcgacagcatcacgctctggcattacaacggcactgaagctggcgctgcggtggtgaaaaacgtcaccatgggcagtctgttgtttgcgattatcgccagtatggtggcctgggcgttgattcgcaacctgcctggtttactggaagtgctggtgctcagccgactgaatatgcgccagggcgcgagctatgccattactaccatccttaactacatcattattgctgttggtgcgatgacggtgttcggaagcctgggcgtctcttgggataaactccagtggctggccgcagcattatccgtaggtcttggttttggtttacaagaaattttcggtaacttcgtctccggtttgatcattctattcgaacgtccggtgcgtattggcgatacggtaaccattggtagcttcagcgggacggtaagtaagatccgtattcgtgcgacaacgattaccgatttcgatcgcaaagaagtgatcatcccgaacaaagcgtttgttaccgagcgtctgatcaactggagcttgactgacactactacgcgtctggtgatccgtctcggcgtggcctatggctccgatctggaaaaagtgcgtaaagtgttactgaaggcggcgactgagcacccaagggtgatgcacgaaccaatgccggaagtcttctttacggcatttggtgccagcacgttggatcatgagctgcgtctgtatgtgcgtgaactgcgtgaccgtagtcgtactgtcgatgagctgaaccgtactatcgatcagctgtgccgtgaaaacgacatcaacattgcctttaaccagcttgaagtgcatctgcacaacgagaagggcgatgaggtgacggaagtaaaacgcgactacaaaggcgatgacccgacgccagcggtagggtaaaaacgaaagggggcaacatttagttgccccgagattgctaacaaagtgcgcgttgttcatgccggatgcggcgtgaccgccttatccggcctacgaaaccgcaagaattcaatatattgcaggagcggtgtaggcctgataagcgtagcgcatcaggcagttttgcgtttgcccgcaaccttaggggacatttagcgaccccatttatttctcacttttccgcctcatcatcgcgcgttaatttcttttcataatcacgctttacaatatccagcgcgcgcagcacggtactggcagggatctgattttcctccagcagcacaatcaaatcgacagccagtttgacatcgtcaggggcattttccagactcatattctctccattgttagcgggttaaacgcgctaacctgttttcgattttttccagcgcatggcggcagcgtgccaggcgcgcttcataggcttccacttcacgatgcagcgtttgctgttccacgagatcggtcacccgcgccagacgggctctgcgttcggcaaccatctcacgtagccgccgctcaaaatcctgatgctgaatacgtttacgctgccagcgggcaattttcggtggtgcactgtcccactcgcgcaaactccaggcggaggcttcacgcgcgatggcttccagttgtgccgccagatgttccgccagccaggccacttgcggcagctgttgctgctcaactgcatgacgaagcgcagccagattatcgcccgcctcgtcgagacaagcctgtagtgttgtcgcacgagtctgaaaaagatgcctgtcgaaacgagcacttagcgtggcgaactgactcaccggggcacaacgctgacgcagcgtagcgagctgtccttccagtttttccagcagcagggcggttttcacgataagacctcaatgaaaatgataattgttatgctaaagtagccactctgtaagctgacaacactcaatatgcaacgaatcattttaatcatcattggctggctggcggtagtgctgggtacgctgggcgtggtattaccggtattaccgacgacgccgtttatcctgctggcggcctggtgctttgcccgttcttccccgcgctttcacgcctggttgctgtaccgcagttggtttggcagctatctacgtttctggcagaaacatcatgcgatgccgcgcggcgtcaaaccgcgggcgattttgcttattttgctcacgtttgccatttctctgtggttcgtccagatgccatgggtgcgcatcatgttgctggtaattctcgcctgtttgcttttctatatgtggcgaattccggtgattgatgaaaagcaagaaaagcactgaagcacaacaatcgcagttgcaattattgcgtacagccagtacattctggcgttttcgagcacaggcgcaggcggtcaaaggttaaacaactgttacttttgatacgtttaaaacgcgccgtgagtaccaccgtaacaagcaggcatacacttatgaccgcgactgcacagcagcttgagtatctcaaaaatagcatcaaaagcattcaggactacccaaaacccggcattcttttccgcgatgtcaccagcttactggaagacccgaaagcttacgctctcagcatcgacttgctggttgagcgttacaaaaatgcgggcattaccaaagttgtcggcaccgaagcgcgtggcttcttgtttggcgctccggtagctctgggtctgggcgttggctttgtaccggtccgtaaaccgggcaaactgccgcgtgaaaccatcagtgaaacttacgacctggaatacggcaccgatcagctggagatccacgttgatgccatcaaaccgggcgacaaagttctggtggtggacgacctgctggcaaccggcggcactatcgaagcgaccgttaaactgatccgtcgtctgggtggtgaagtggctgacgctgcgttcattatcaacctgttcgatctcggcggcgaacagcgtctcgaaaaacagggcattaccagctacagccttgtcccgttcccgggccattaattatcgccagtcttgtgctgcccacgctacggacagcacaagatgtgcattcagcctcgccgttctgacggggctgtgttagcattaccccttcgtgaatccaccttccagcgtttcagagcctgccaatgagttatcaggtcttagcccgaaaatggcgcccacaaacctttgctgacgtcgtcggccaggaacatgtgctgaccgcactggcgaacggcttgagcttggggcgtattcatcatgcttatcttttttccggcacccgtggcgtcggaaaaacctctatcgcccgactgctggcgaaggggctaaactgcgaaaccggcattaccgcgacgccgtgcggcgtgtgcgataactgtcgtgaaatcgagcaggggcgctttgtcgatctgattgaaatcgacgccgccagccgcaccaaagttgaagatacccgcgacctgctggataacgtccagtacgctccggcgcgtggtcgtttcaaagtttatctgatcgacgaagtgcatatgctgagccgccacagctttaacgcactgttaaaaacccttgaagagccgccggagcacgttaagtttctgctggcgacgaccgatccacagaaattgccggtgacgattttgagtcgctgtctgcaatttcatctcaaggcgctggatgtcgagcaaattcgccatcagcttgagcacatcctcaacgaagaacatatcgctcacgagccgcgggcgctgcaattgctggcacgcgccgctgaaggcagcctgcgagatgccttaagtctgaccgaccaggcgattgccagcggtgacggccaggttagtacccaggcggtcagtgcgatgctgggtacgcttgacgacgatcaggcgctgagcctggttgaagcgatggtcgaggccaacggcgagcgcgtaatggcgctgattaatgaagccgctgcccgtggtatcgagtgggaagcgttgctggtggaaatgctcggcctgttgcatcgtattgcgatggtacaacttagccctgctgcacttggcaacgacatggccgccatcgagctgcggatgcgtgaactggcgcgcaccataccgccgacggatattcagctttactatcagacgctgttgattggtcgcaaagaattaccgtatgcgccggaccgtcgcatgggcgttgagatgacgctgctgcgcgcgctggcattccatccgcgtatgccgctgcctgagccagaagtgccacgacagtcctttgcacccgtcgcgccaacggcagtaatgacgccaacccaggtgccgccgcaaccgcaaagtgcgccgcagcaggcaccgactgtaccgctcccggaaaccaccagccaggtgctggcggcgcgccagcagttgcagcgcgtgcagggagcaaccaaagcaaaaaagagtgaaccggcagccgctacccgcgcgcggccggtgaataacgctgcgctggaaagactggctagcgtcaccgatcgcgttcaggcgcgtccggtgccaagcgcgctggaaaaagcgccagccaaaaaagaagcgtatcgctggaaggcgaccactccggtgatgcagcaaaaagaagtggtcgccacgccgaaggcgctgaaaaaagcgctggaacatgaaaaaacgccggaactggcggcgaagctagcggcagaagccattgagcgcgacccgtgggcggcacaggtgagccaacttagcctaccaaaactggtcgaacaggtggcgttaaatgcctggaaagaggagagcgacaacgcagtatgtctgcatttgcgctcctctcagcggcatttgaacaaccgcggtgcacagcaaaaactggctgaagcgttgagcatgttaaaaggtagtacggttgaactgactatcgttgaagatgataatcccgcggtgcgtacgccgctggagtggcgtcaggcgatatacgaagaaaaacttgcgcaggcgcgcgagtccattattgcggataataatattcagaccctgcgtcggttcttcgatgcggagctggatgaagaaagtatccgccccatttgatcgtaagcacagcttacgttcgtcatccttaacgtgattgagagagaaacctatgtttggtaaaggcggtctgggtaacctgatgaagcaagcccagcagatgcaagaaaaaatgcagaaaatgcaggaagagatcgcgcagctggaagtcaccggcgaatctggcgcaggtctggtaaaagtgaccatcaacggtgcacacaactgccgtcgcgtagagatcgacccgagcctgctggaagacgacaaagagatgctggaagacctggtggctgcagcattcaacgacgcagcacgtcgtattgaagaaacgcagaaagaaaaaatggcctctgtatcctccggaatgcagctgccgcctggctttaagatgccgttctgatgcaaaccagcccgctgttaacacagcttatggaagcactgcgctgtctgccgggcgttggcccgaagagcgcgcagcgtatggcgttcacgctgcttcagcgcgatcgtagcggcgggatgcgtctggcgcaggcgctcacccgggcgatgagcgaaatcggccactgcgccgattgccgcactttcaccgaacaggaagtctgtaacatctgtagcaatccgcgtcgtcaggaaaacggtcaaatctgcgtggtggagagtccggcggacatctacgccattgagcagacggggcagtttagtggtcgttattttgtgttgatggggcatctgagtccgctggacggcatcggtccggatgatatcgggcttgatcgtctggaacagcgtctggcagaggaaaaaatcactgaagtgatcctcgccaccaaccccacggttgaaggtgaagctaccgctaactacattgccgagctttgcgcgcaatatgacgtggaagccagccgaatcgctcatggcgttccggttggcggcgagctggaaatggtcgacggcaccacgttgagtcactcccttgccgggcgtcataagattcgtttttaagcaaacgagagcaggatcacctgctctcgcttgaaattattctcccttgtccccatctctcccacatcctgtttttaaccttaaaatggcattattgaggtagacctacatgaaaggacaagaaactcgtggttttcagagtgaagtgaaacagcttctgcacctgatgatccattctctctattccaataaagaaatcttcctgcgtgagcttatctctaacgcctccgatgcggcggacaagctgcgtttccgtgcgctctctaacccggacctgtacgaaggtgatggcgaactacgcgttcgtgtctctttcgataaagacaagcgtacgctgaccatctccgataacggcgtggggatgacccgcgacgaagtgattgaccatctggggactatcgctaaatccggtaccaaaagtttcctcgaatccctgggttctgaccaggcgaaagacagccagctgatcggtcagtttggtgttggtttctactctgcgtttatcgtggccgacaaagtgaccgtgcgtactcgcgcggcaggcgaaaaaccagaaaatggcgtcttctgggaaagcgctggcgaaggtgaatacaccgttgccgacatcaccaaagaagatcgtggtactgaaatcaccctgcatctgcgtgaaggcgaagacgagttcctcgatgactggcgcgtgcgttccatcatcagcaaatactccgaccatatcgcgctgccggtagagatcgaaaaacgcgaagagaaagacggcgaaaccgttatctcctgggagaaaatcaacaaagcgcaggcgctgtggactcgtaacaagagcgaaatcaccgatgaagagtacaaagagttctacaaacacatcgcccacgactttaatgatccgctgacctggagccacaaccgtgttgaaggtaagcaggagtacaccagcctgctgtacatcccgtcccaggctccgtgggatatgtggaaccgcgatcataaacacggcctgaaactgtatgttcagcgtgtgttcatcatggacgacgcagaacagttcatgccgaactatctgcgcttcgtgcgtggtctgattgactccagcgatctgccgctgaacgtttcccgtgaaatcctccaggacagcacggtaacgcgtaacctgcgcaatgcgctgaccaagcgtgtgctgcaaatgctggaaaaactggcgaaagacgacgcggaaaaataccagaccttctggcaacagtttggcctggtactgaaagaaggtccggcggaagatttcgctaaccaggaagcgatcgccaaactgctgcgttttgcttctacccataccgattcttctgcgcagaccgtatctctggaagactacgtttcccgcatgaaagaagggcaggagaaaatctactacatcaccgcagacagctatgcggcagcgaagagcagcccgcacctggaactgctgcgtaagaaaggcatcgaagttctgctgctttccgaccgcatcgatgagtggatgatgaactatctgactgagttcgacggtaaaccgttccagagcgtgtctaaagttgacgagagccttgaaaaactggctgacgaagttgatgagagcgcgaaagaagcggagaaagcactgactccgttcatcgaccgtgtgaaagccctgctcggcgagcgcgtgaaagatgtccgtctgactcaccgtctgaccgatacgccagcgatcgttagcaccgacgcggacgaaatgagcactcagatggcgaaactgttcgctgcggcgggccagaaagtgccagaagtgaaatacatcttcgaactgaacccggatcacgtactggtgaaacgtgcggcagatactgaagatgaagcgaagttcagcgagtgggtagaactgctgctggatcaggcgctgctggcagaacgcggcacgctggaagatccgaacctgtttattcgtcgtatgaaccagctgctggtttcctgatgtaatgccggatgaccttcgtgtcatccggcatttttcttttcatcatctgcactttccgcaaattatctcgccattaaccgtttcagccccaggtgcctttcttgaggcaatcgcctgttggtggtatcgtttatcgctttttcaaaaaattcgacacattttaaggggattttcgcaatgcgtatcattctgcttggcgctccgggcgcggggaaagggactcaggctcagttcatcatggagaaatatggtattccgcaaatctccactggcgatatgctgcgtgctgcggtcaaatctggctccgagctgggtaaacaagcaaaagacattatggatgctggcaaactggtcaccgacgaactggtgatcgcgctggttaaagagcgcattgctcaggaagactgccgtaatggtttcctgttggacggcttcccgcgtaccattccgcaggcagacgcgatgaaagaagcgggcatcaatgttgattacgttctggaattcgacgtaccggacgaactgatcgttgaccgtatcgtcggtcgccgcgttcatgcgccgtctggtcgtgtttatcacgttaaattcaatccgccgaaagtagaaggcaaagacgacgttaccggtgaagaactgactacccgtaaagatgatcaggaagagaccgtacgtaaacgtctggttgaataccatcagatgacagcaccgctgatcggctactactccaaagaagcagaagcgggtaataccaaatacgcgaaagttgacggcaccaagccggttgctgaagttcgcgctgatctggaaaaaatcctcggctaattcgaaagcgcgcacggacagtcccctcgccccctcggggagagggttagggtgaggggaacaggcccgcacaagcaaacttatcagcaatctcaggccggatattcattcggccttttacaaaaacctcaatctgcgctattcctttttctgatttgacctctcacagcaattagttcttcttcctcacttttccgctacaattatcaacaagttgaatcgataagaggcggtaatgcgtcagactaaaaccggtatcctgctggcaaacctgggtacgcccgatgcccccacacctgaagcggtaaaacgctatctgaaacaatttttaagcgacagacgcgtggttgataccagtcggttgttatggtggccattgctgcgcggcgtgattttgccgctgcgcagcccgcgtgtggcgaagctgtatgcctctgtctggatggaaggtggcagcccgctgatggtttacagccgccagcaacagcaggcgctggcacaacgtttaccggagatgcccgtagcgctgggaatgagctacggcagcccaagtctggaaagcgccgtagatgaactcctggcagagcatgtagatcatattgtggtgctgccgctttatccgcaattctcctgttctacggtcggtgcggtatgggatgaactggcacgcattctggcgcgcaaacgtagcattccggggataagctttatacgtgattacgccgataaccacgattacattaatgcactggcgaacagcgtacgcgcttcttttgccaaacatggcgaaccggatctgctactgctctcttatcatggcattccccagcgttatgcagatgaaggcgatgattacccgcaacgttgccgcacaacgactcgtgaactggcttccgcattggggatggcaccggaaaaagtgatgatgacctttcagagccgctttggtcgggaaccctggctgatgccttataccgacgaaacgctgaaaatgctcggagaaaaaggcgtaggtcatattcaggtgatgtgcccgggctttgctgcggattgtctggagacgctggaagagattgccgagcaaaaccgtgaggtcttcctcggtgccggcgggaaaaaatatgaatatattccggcgcttaatgccacgccggaacatatcgaaatgatggctaatcttgttgccgcgtatcgttaaagctgagcggtaaagaactgagcgccgtcgcgaagagcctcgtcggcggttttcatcatccgactataatgcaaaaaggcgtgcagcgtgcctgggtagagtttgaactcacagggctgctgatgcgccgctaacgtctggtaaagcagacggctgtcatccagcagcggatcgaactccgccccggcaataaaacagggcggaacttcgcgagtgagatcattattaaacagacagtaatacgggctctcgcggtccgcgtcgttgcttaaatatgcctcttcgtacatctgcaaatcctgttgcgttaagccatcccagacaccgcccaacagacgacgagtcacggaatcccgtaatccgtaaagcccataccacagcaaaacgcccgcaactttaccgcaatcgatctgtttatcacgcaaccacaacgcactggcgagcgccagcatggcacctgcggaatcaccggcaaagccaatgcgggacatattgatttgataatcctccgcctgctggtggaaataacaacaagcagccacaatttcctctatcgcttgcggaaaacgcgcttcaggactaagggtgtaatcaataccaatcaccgtacattggctgtagcttgccagcaggcgcatgatgcgatcgtgggtatcgagattgccgagaataaaaccgcctccatgcaaataaaatagcgtcgctgggctatctggctgcggacaaaagagacgtgtttccacctgcccatattttgttggaaccatgtaagctctggttgccatttctggagcgcccgcattccagaatcggcgctcaagcgtgtaatactgtcgttgctcagcaatcgttcccgttgcgggccagggcggtaaatccggctgaagagtattcacaacggtcttcatttcagcagaaataaggtccagaacaggtagtttgttttccggcttcatacaaaaactcctttcaaattacgtcattgtaaggaaccactgccatgaaaatgcgatcccgcctgctgatattgaaactggctgcgtctcgcgcgctcccgtcagattgtgttaacattcgccgctcagttaaccacccgtaaaaacaaccatgaaatttcccggtaaacgtaaatccaaacattacttccccgtaaacgcacgcgatccgctgcttcagcaattccagccagaaaacgaaaccagcgctgcctgggtagtgggtatcgatcaaacgctggtcgatattgaagcgaaagtggatgatgaatttattgagcgttatggattaagcgccgggcatagtctggtgattgaggatgatgtagccgaagcgctttatcaggaactaaaacagaaaaacctgattacccatcagtttgcgggtggcaccattggtaacaccatgcacaactacagcgtgctcgcggacgaccgtagcgtgctgctgggcgtcatgtgcagcaatattgaaattggcagttatgcctatcgttacctgtgtaacacttccagccgtaccgatcttaactatctacaaggcgtggatggcccgattggtcgttgctttacgctgattggcgagtccggggaacgtacctttgctatcagtccaggccacatgaaccagctgcgggctgaaagcattccggaagatgtgattgccggagccagcgcactggttctcaccagttatctggtgcgttgcaagccgggtgaacccatgccggaagcaaccatgaaagccattgagtacgcgaagaaatataacgtaccggtggtgctgacgctgggcaccaagtttgtcattgccgagaatccgcagtggtggcagcaattcctcaaagatcacgtctctatccttgcgatgaacgaagatgaagccgaagcgttgaccggagaaagcgatccgttgttggcatctgacaaggcgctggactgggtagatctggtgctgtgcaccgccgggccaatcggcttgtatatggcgggctttaccgaagacgaagcgaaacgtaaaacccagcatccgctgctgccgggcgctatagcggaattcaaccagtatgagtttagccgcgccatgcgccacaaggattgccagaatccgctgcgtgtatatagccacattgcgccgtacatgggcgggccggaaaaaatcatgaacactaatggagcgggggatggcgcattggcagcgttgctgcatgacattaccgccaacagctaccatcgtagcaacgtaccaaactccagcaaacataaattcacctggttaacttatagtagcttagcgcaggtgtgtaaatatgctaaccgtgtgagctatcaggtactgaaccagcatagtcctcgtttaacgcgcggcttgccggagcgtgaagacagcctggaagagtcttactgggatcgttaagttatcgtcggttcgtaggccagataaggcgttcacgccgcatctggcatttggctctcgatgcctgatgcgacgctggcgcgtcttatcatgcctacatatttttcatattttacatccggcaaccaccgtttaccccgtcaccacctcacccgccggtggcgtttccagcagttccagcatggtacgggcgatttcacgctcgcccatcactacctgattcgcaccacgttcggtgatatacgccacttcatcgtcataatgggcgcgggcaataatctcaatatccggatttttcgcgcgggcagatgccacaatctcacccgcttcataaccgttgggaatcgtcaggatcagccattttgcacattccagatgcgccagttgcataatttcttcgttcgccgcattgcccaatactgcgcggaccccgcgctctcgcagctcatcaacacgggttcgactcgtctcaatcaccaccagcggaatatcagaggcgagcaatttctcccccagcaggctgcctacacgaccgtaacccaccagtagcgcatggttgcaaatatccactgggatctgcttctcttcttcgattgcctcttccagcgtctgctcttccagcgtttcggtcttcgccagatatttctccagtagtgcgaacagtaccgggttgagcataatgctcaggatcgcccctgccagtaccaggttttgtccggcctgcggcagtaaattcaatgccattcccagtcccgccaggataaacgcgaactcaccaatctgcgccaggctggcggcgatggttaatgccgtacgttgggagtgaccaaacagtcgcaccaggaaaaatgcggctaagctcttaccaaacagaataatcgccagcgtcgccagcactgccagcggttgctgaatcagaattaacggatcaaacaacatcccgacggagacaaaaaacagcaccgcaaacgcgtcgcgcaatggcagcgtatcgtgggcggcacggtgactcagttcagactcgttcagtaccatcccggcaaagaacgcaccgagtgcaaaggagacatcaaacagctctaccgcaccaaaggcaacccctaacgccagcgccagcacgctcagggtaaacagctcgcgagaaccggttgccgcgctgcgtgccataatccacggcaccagacggcgacctaccagcatcataatggcgataaatgcgatcactttgccgatggtgatccccatatcgactgcaagagtggcaaagcccacatcgccctgttccatcattcctgccactgcgggcagcaacaccagcgtcagaaccattaccaggtcttccacaatcaaccaaccgatggcgatttgcccacgctgactgtcaattaattgccgttcttcaagtgcgcgcagtaacaccacggtactggcggtggaaagacataaaccgaacacgataccggtcattaagctccagcccagcacggcagagagcgccatacccagcagcgtcgccacggctatctgggcgatcgcaccgggaatggcgatggcctttaccgccatcaaatccttcaggctaaagtgcaaaccgacgccaaacatcaacagaatgacgcccagttcagccagttccggggcaagcttggtatcggcaacaaagcccggagtgaatggtcctgccagcacacccgctaacagatatcccaccagaggagaaatacgtagtttattggccagcatgccgaggataaaggcgagcacaaggccgccaacaatggtggtgataagcggggtggcgtgatgcattccgtctccttttcctggtggttattgtccatttttggccgggaaaaccaaaattacaggtaatagtttatgacaatttcattgatgatgttcatgaataattattgaattttgcagaaaaatggaattagctgcaaaaaaagcacggatcggaaaacagaaggcggtttaacagaggaaaggcttatggcgactgtaaaacgatgcagccaaagtttgcctttggctgcaatgaaatcagtctttatgccggttatcaggcaggaatatggtcaacatccccaatagtggcaggaaagcacagattttatagactaactcgatgctggtgtgatcggcgataagccccagaactgccgctcccagacctcccatgccaaaagcaaaaccgaaaaagagtccagaaaccataccgatacgtcctggaagcagctcctgagcgtagaccagaatggcagagaatgcgctagcgaggataaatccaataatcaccgttaaaacccccgtccagtgcaggctggcgtagggtaaaatcagcgtaaacggcgcaacgccgaggatagagccccaaatcacatatttccgcccaattttatcccctacaggcccgccgatcaccgtacctgccgcaacggcaaacaggaaggcaaacagatgaagctgagcattctggatagataatccgaatttttgcatcagataaaaggtgtaatagctgctgatgctcgccatatagaaatatttgctgaaaatgaggattaacagaatgctgaccgccagtacaactttattgcgcggcagtggattgataatcgtcgctttgggttttcctttattcattcggtgctgtgcgctgtaccaacggctgatttgcgccaacaccacgatcgccagcagtgccgcaagcacaaaccaggcaacgttgcctttgccataaggcgcgataatcaccgccgccagcaagggtcccagggaactgccaaagttgccgccgacctgaaagatagattgcgccaggccatgccgcccgccggaagccatacgggccacgcgagaagattccggatgaaagacgctactaccggtaccgaccagcgccgccgccagcagaactgcgccaaaactgcccgccagcgcaagcagcaccagaccgcttaaggtaaagcacatgccaattggcaagctccatggcatcggatatttatcggtccagtagccgaccactggttgcagtaggctagaggcgagctggaaggtgagggttatcatgccaatctgcataaatgtcagagaaaattcactctgaagcagcggataaatcgccagaatcaggctttggatcatgtcgttcagcagatgactgaggctgatagcacctaaaataccaaagcttgttcgggccttggtcgtactcgcagccgcgcccgccacaggctggggttgttcactcattgccataggaaagtcactttttcagggttgcgatgtaaagaatgatcttatttgtgattattaccagactaacatacctgtatgcgtcgtctgaaggaagtctcaacgccgaatacagaatttctaatctggatgcagatttatcttcaccggacgcagacttgtctatgatgtcgcgtcatactatttttcaacacgttgaaatcaggtcagggagagaagtatgaaattattgcagcggggcgtggcgttagcgctgttaaccacatttacactggcgagtgaaactgctctggcgtatgagcaggataaaacctacaaaattacagttctgcataccaatgatcatcatgggcatttttggcgcaatgaatatggcgaatatggtctggcggcgcaaaaaacgctggtggatggtatccgcaaagaggttgcggctgaaggcggtagcgtgctgctactttccggtggcgacattaacactggcgtgcccgagtctgacttacaggatgccgaacctgattttcgcggtatgaatctggtgggctatgacgcgatggcgatcggtaatcatgaatttgataatccgctcaccgtattacgccagcaggaaaagtgggccaagttcccgttgctttccgcgaatatctaccagaaaagtactggcgagcgcctgtttaaaccgtgggcgctgtttaagcgtcaggatctgaaaattgccgttattgggctgacaaccgatgacacagcaaaaattggtaacccggaatacttcactgatatcgaatttcgtaagcccgccgatgaagcgaagctggtgattcaggagctgcaacagacagaaaagccagacattattatcgcggcgacccatatggggcattacgataatggtgagcacggctctaacgcaccgggcgatgtggagatggcacgcgcgctgcctgccggaagcctggcgatgatcgtcggtggtcacagccaagatccggtctgcatggcggcagaaaacaaaaaacaggtcgattacgtgccgggtacgccatgcaaaccagatcaacaaaacggcatctggattgtgcaggcgcatgagtggggcaaatacgtgggacgggctgattttgagtttcgtaatggcgaaatgaaaatggttaactaccagctgattccggtgaacctgaagaagaaagtgacctgggaagacgggaaaagcgagcgcgtgctttacactcctgaaatcgctgaaaaccagcaaatgatcagcctgttaagtccgttccagaacaaaggcaaagcgcagctggaagtgaaaataggcgaaaccaatggtcgtctggaaggcgatcgtgacaaagtgcgttttgtacagaccaatatggggcggttgattctggcagcccaaatggatcgcactggtgccgactttgcggtgatgagcggaggcggaattcgtgattctatcgaagcaggcgatatcagctataaaaacgtgctgaaagtgcagccattcggcaatgtggtggtgtatgccgacatgaccggtaaagaggtgattgattacctgaccgccgtcgcgcagatgaagccagatagtggtgcctacccgcaatttgccaacgttagctttgtggcgaaagacggcaaactgaacgaccttaaaatcaaaggcgaaccggtcgatccggcgaaaacttaccgtatggcgacattaaacttcaatgccaccggcggtgatggatatccgcgccttgataacaaaccgggctatgtgaataccggctttattgatgccgaagtgctgaaagcgtatatccagaaaagcagcccgctggatgtgagtgtttatgaaccgaaaggtgaggtgagctggcagtaatccgaaagtgccggatgtttgcatccggcacaatgcttaatcgcggcgggcgatatcagcaaatttggcatcgaggatctttgccagatcgcctgccgccagttcgatatccagtccgcgcttgccgccggaaacataaatagtggcaaattcttgtgcgggggcgtcgataatcgttggcagacgttttttctgccccagtgggctaatccccccaaccaggtatcccgtgctacgctgcgcgaccatcggatcggccatctcaactttcttggcacccagcgcttttgctacttttttaagatccagttgacctgcgaccggcgtaacggccacggcaaggtgtttcatatcaccgttcactgccaccagcagcgttttgtagacctgatccggattcaaacctaattttttgacgacttcatcgccaaaattggtttcagccggatcgtgctcgtaggtatggatttgaaagctaatcttgttttttcgagtaatttaactgcgggtgtcatggtaattttcctgccttaaacaaaaaaacgaagcaagcatacgcctgatggcggtccaaaaaaaagagtcatcttgcctaagagtattggcaggatggtgagattgagcgacaatcgagttacaccgtcgcttaaagtgacggcataataataaaaaaatgaaattcctctttgacgggccaatagcgatattggccatttttttagcgcaacatttgcggcaaattcccttctccatacaggtgtagtgcaccgaccgcgaccacatatcgccccggcggcatggcgcgtaatttatcccgccaggcgagatttcgctgatgcatcagcacatcgtacaggctctgactgaacgtattgggcagcgttatatcattattttgcggcggtgcattcagccaccagctcatcatttgttgcagcaaccgtgcgttggtatgccagtgggtcagcgtatcgtccagcagcgccagtcctttgtcagggagctggagcaacatggcaatctggttttcagccccttccagttcaatcacgggtttatgttgttgcttcgccgcctgcaatagctggtaatcgataccgtattctgcccgcagccccagtttttgtgcctgcgtcgcctgaagaaccatcgcgatttgccacagcggttgggtagaaaagagactgggagaaatgcccatctcctggctaatgtgctgcaggttttggagttgctcctcgctaatgcgctcttccagcgcctcgcaggcaggcaaattagcaaaaggcgtatcgctggtggaaacatccgcctcgacgatcagcgcatcggcgtttttgagctttttgagcaaacgggtgggcaggggagccatatcgtggctacccatatgaatactgccaatcagatgaaaatggcgattgccggggagggtgatatcgatggcaggccaggtgtaatgattaccgcgcagcgcggcccaaagcgtttttacccggtacaacagatccatacgacctccctttgtgaaatatcatgctagcgcgcggtgagggatggcgcaaatggagttggagacttgtttaatgtgtttgtatgattcagtatgttcttgcatcgctattcacaaggaagcaacagttaaaaaccatgaaacaggcaacaagaaaaccgacgacacccggagatattcttctctatgaatatctggaaccgctcgatttgaaaatcaatgagttagcagagttgctgcatgttcatcgtaatagcgtcagtgcactgatcaataacaatcgtaaactcactactgagatggcatttcgtctggcgaaagtttttgataccacagtcgatttttggctaaacctccaggcggcggttgatctttgggaagttgaaaacaacatgcgcacccaggaagaattgggacggattgaaacagtggctgaatatttggcacgccgtgaagagcgtgcaaaaaaggtcgcgtaaggccaaaacatcgcttcatctcgtaggccggataaggcgttcacgccgcatccggcatccgagcaccattgcctgatgcgacgcttacccgtcttatcaggcctacaaacttgtgcctgaaccgtaggccggataaggcgtttacgccgcatccggcatccgagcaccattgcctgatgcgacgcttacgcgtcttatcaggcctacaaacctgtgcctgaaccgtaggccggataaggcgtttacgccgcatccggcagtcatgcgtcgatgccaaatgcgccaccctaaagcagcgcatccgcaatgatgtacttattccttcggtttaaaccgcagcaaccggttggcgttactcactacggtaatgctgctgagcgccattgccgctccggcaactaccgggttaagcagtgttccagtgaacggccacaaaataccggcggcgaccggaataccgatactgttgtagataaacgcaccgagcaggttctgcttcatgttgtgcagcgttgcgcgggaaatagcgagcgcatccgcaacgcccatcaggctatggcgcatcagggtaatcgccgcggtttcaatggcaacatcactgccgccacccatcgcaatgccgacatccgcctgagccagcgctggcgcgtcgttaatgccgtcgcccaccattgccacctaacgtccttcactttgcagatgtttgatcgcttcggctttaccgtccggcagcaccccggcgatcacctcatcaatccctgcttctttggcgatcgcattggcggtggttgggttatccccggtcaacatcaccagacgatatcccgctttatgcaggcgttgcagcgccgccacgctatcactacgcaacggatcgcgtactgccagcagggctaccgctttcccgtcaaccgccagcagcacaggcgttgccccttggcttgcctgagcagtaatctccgcttcgatagctttggtaccaacctgttgctcatttaacagcgcctgattgcccagcaataacgcatgaccttcagcttcaccgctcacgcccagcccgcgcaatgtgcggaaaccgttgacctgcggtagctgcatatcacctgctttatcgaggatcgctcgtgccagcggatggctggaaccttgctccagtgccgccgccagacgcaatgcctgcgcttcatcaacatcagcaaatgttttcactgcgacaacctgcggcttcccttcagtcagcgtcccggttttatcgaacactacagtgtcgagtgtactggcgcgttgcagcgcgtcagcgtcccgcaccagcacgccaaactcagccgcccgcccgacgccggaaataatgctcatcggcgtcgccagccccagcgcacacggacaggcaataatcagtaccgtggtggcaatcaccagggtatagacaatctgcggtgccggaccaaagaaataccagattgccgcactgacaagcgcaataaccaccactaccggcacaaatacggcactgattttatccgccagctgaccgatttctggcttgctgctctgggcctggcgcaccatgcgaatgattcgactcagcgtagtatggctgccaaccgcactggcacgaaacagcacactgccgtcctgtaccactgtcccggcatggacgctatcgccttcgcctttttgctgcgggattggttcgcccgtcagcatcgcttcatccagccatgcttcgccctgggtaatctcgccatctaccggcacgcgatcgccggtcgtcaggcgcagcaacatacctggctgcacttctgccagaggcacgcttttttcaccttcgtcagtaaccaggcgtgccgtcggcggggttaaatcgagtaacttttccagcgccttagaagaacgctggcgtgcgcgcgcttccagcatatggccgagattgatcagaccgataatcatcgcgctggcttcgtaataaagatgtcgcgcttccatcgggaaccactgcggccacaggttgacgctcatgctatagagccacgccacgccagtacccagcgccaccagcgtatccatcgtcgccgcaccgttcagcaggcttttccatgcactgcggtaaaaatggccgccggcgaaaaccatcactgccagggttatcaggccgataaccaaccacaggctgcggttgtcagcggtgaccatcatgttatcgccgatcatcccccagaccatcaccgggatacccaccgccagtgcgacaattgcctgccagcggaagcgcttcatcgtagcgacggcggtttcttgctggcgctcgcggcgtttagcgtcatcttcaatcgcttccgcgccgtagcccgctttttccaccgcctgcactaaatcttgtggggaggcactgcccatcaccagcgcagtacgctccgccaggtttacccgtgcctgagtgacgcccggtacgctttgcagcgcattttgtacgcgggtgacacagctggcgcagctcatgccgctcagcagcaactgctggctgtcatcgtcatcggcggtcgctgccggaagcgcctcagaaaccgctgtcagtgcttcgctcgggatactactctccgccagcggtttagcctttgggtggcttacagatgcgtcataacccgcttgtttgatggtttcgatcagctgttctgcactggcagtcccggtaacgtgcgcttcagtgatagacacatccgcctgctcaacatccggacgctgttcaagactttctttcacgcgtttaacgcagtgaccgcaggacaggccgtccagggtcaggtcgatagtttgactcataaaacactcctttaagacagttttgactggctgtgataaaggttaaaccttccagcaaggggaaggtcaagaaattaataaaccaggcgggtaaaagtccgtaaagattaaaaaatcggctcgatttgcatcaggattagacatttatctctttgttttcctgtagttaagttgcgggtgctaagttaaatcaggatgcctgaaaatcggcaccggggtgaggaattacctcccgcatctataaaaaggagttaacaaaagatgttagatgcaaacaaattacagcaggcagtggatcaggcttacacccaatttcacagtcttaacggcggacaaaatgccgattacattccctttctggcgaatgtaccaggtcaactggcggcagtggctatcgtgacctgcgatggcaacgtctatagtgcgggtgacagtgattaccgctttgcactggaatccatcagcaaagtctgtacgttagcccttgcgttagaagatgtcggcccgcaggcggtacaggacaaaattggcgctgacccgaccggattgccctttaacagtgttatcgccttagagttgcatggcggcaaaccgcttagcccactggtaaatgctggcgctattgccaccaccagcctgattaacgctgaaaatgttgaacaacgctggcagcgaattttacatatccaacagcaactggctggcgagcaggtagcgctctctgacgaagtcaaccagagcgaacaaacaaccaacttccataaccgggccatagcctggctgctgtactccgccggatatctctattgtgatgcaatggaagcctgtgacgtgtatacccgtcagtgctccacgctcctcaatactattgaactggcaacgcttggcgcgacgctggcggcaggtggtgtgaatccgttgacgcataaacgcgttcttcaggccgacaacgtgccgtacattctggccgaaatgatgatggaagggctgtatggtcgctccggtgactgggcgtatcgtgttggtttaccgggcaaaagcggtgtaggtggcggtattctggcggtcgtccctggagtgatgggaattgccgcgttcagtccaccgctggacgaagatggcaacagtgttcgcggtcaaaaaatggtggcaagcgtcgctaagcaactcggctataacgtgtttaagggctgatcatgatgaacacggaaggtaataacggtaacaaacctctcggtctatggaacgtcgtttccatcggcattggggcaatggtgggggcggggatcttcgcgctgctggggcaggctgcattgctaatggaagccagcacctgggtcgcctttgcttttggcggtattgtggcgatgttttccggttatgcctatgcgcgtctgggggcgagctatcccagcaatggcggcattatcgacttctttcgtcgcggattaggcaacggcgtctttagcctggcgctcagcttactgtacctgttgacgctggcggtgagcatcgccatggtcgcccgtgcttttggcgcttatgccgtgcagtttttgcatgaaggcagccaggaggagcaccttattttgctctacgcgttggggatcattgcggtgatgacgcttttcaactccttaagcaaccatgcggtagggcggctggaagtgatcctcgtcggcattaaaatgatgatcctgttattgctgattattgccggtgtctggagcctgcaaccggcgcatatttccgtctctgcgccccccagctccggtgcgttcttctcctgtattgggataactttccttgcctatgcgggctttggcatgatggcgaacgcggcggataaagtgaaagatccgcaggtcattatgccacgggcgtttctggtggcgattggcgttaccacgttgctttatatcagcctggcactggttttgcttagcgatgtaagcgcattagagttagaaaaatatgccgataccgccgtagcgcaggctgcttctccgctgctcgggcatgtgggttatgtgatcgtcgtcatcggcgctttactggcgacggctagtgccattaacgcgaacctgttcgccgtgtttaacatcatggacaacatgggcagcgaacgcgaactgccgaagctaatgaataaatccctgtggcggcagagtacctggggcaacattattgtcgtggtgttgattatgctgatgacggcggcactgaatttaggcagtctcgccagcgttgccagcgccacctttttgatttgctacctggcggtgtttgtggtggcgatccgcctgcgtcatgatattcacgccagcttgccgattcttatcgttggtacgttggtgatgttgttggtgatcgttggctttatctacagtctgtggtcccagggtagccgtgcgttgatatggattattggcagtctcttactcagccttattgtggcaatggtcatgaagcgcaataaaaccgtataacatctctctgtgcgcagtacttcctgtattattgtggtggcggtcgatattcgcactggcaaaaaaacgtgcttgaatatctgttgaaaccctttaacaaagcacaggaggcgttgcgcgaacgatgaacatcagcgatgtagcaaaaattaccggcctgaccagcaaagccattcgcttctatgaagagaaggggctggtgacgccgccgatgcgcagcgaaaacggttatcgcacctacacgcagcagcatctcaacgaactgaccttactgcgccaggcacggcaggtgggctttaacctggaagagagcggcgagctggtgaatctgtttaacgacccgcagcggcacagcgccgacgtcaaacggcgcacgctggagaaggtggcggagaacgaacgacacattgaggagctgcaatccatgcgcgaccagctgctggcactggcgaatgcctgccctggcgatgacagcgccgactgcccgattatcgaaaatctctccggctgctgtcatcatcgggcagggtgattaagagctgacggctcggatatgtagggttatcccttctatcgcaatgacttcaacatgcgtacctgcaccgagatcctcgctggcgctgacaggccaactactgtcaccgacgcgcatatgaccgcgcccgttgaccagcggagattccagcacaaaacgtcggccaatcagctgctgcccgcgctggtttaaatgactatcgctgtgcttttgttcgcgcacccgccggctcaaccatttccaccacagccaggcggcgagcagcgtcaggatggcaaacattaccccttgccactcccaacccagcggcaccagccagaccaccaggccggtaatcaccgctgccacgccgctccacaacaaataaccatttccgcccagcatctcggctgccagcagcaaaccgccgagactgagccagaaaatatgtggatgaacgaccattaactccatcatggctgagtccgtttgttggcgctgtctttcaccagctcggcaatcccggcaatgctccccatcaggctgctggcctctaatggcatcatcactactttgctgttactggaggaaccgatctgctgtaacgcttcggtgtatttctgcgctacgaagtagttcaccgcctgaatatcaccggaggcgatagcttcagacaccattttggtggcgcgggcttctgcttcggcggaacgttcacgcgcttcagcctgtaaaaacgcgctctgacgttcgccttccgctttcaggatttggctctgtttttcaccttcggctttgaggatttccgcctgacggatcccttccgcttcaagaatgtaagcgcgtttggtacgttccgctttcatctgcgcgttcatactagagataagctctgccggtgggcgcacgtcgcgaatttcaatacgggtgactttaatcccccacgggttggtggcttcatcgacaatacgcagcaggcgactgttgatgctgtcgcgctgagagagcatttcgtcaagttccatactacccagcacggtacggatgttagtcatggtcaggttgatgatcgccagctccagattgctgacttcataagccgcgcgcggcgcgtcaatcacctgaataaagcacacggcgtcgatggtaacgttggcgttatctttgctgataacttcctgggaagggatatcgagcacttgctccatcatattgatcttgcgaccaatgcgatccataaacggcaccaccagactgagccccggctgtaacgttttggtatagcgaccaaagcgttctactgtccactgatagccctgcggtacgattttgacacccgcgccgacaatgaccagcgcgacaaaaatgagaatcgggataaagataagcatcggaaaaacctcctgttgtaccgtccataatcagcaaaattgctgcttgattaaacaaattatacctgattactgaaagagagttcccccttattcctgcgaaggataaactgtttttagtaaaaatcagaaaaagggaacagcgatgcaggaaaatagtcctttgcttcagctacaaaacgtaggatatctggcgggtgatgcgaagattcttaataacatcaattttagcctgcgtgctggcgaatttaagttaattaccggtccttctggttgtggcaaaagtacgctgctaaaaatagttgctagtttgatcagcccaaccagcggaacgttactgtttgaaggtgaggatgtcagcacactaaagccagaaatctaccgccaacaagtctcttactgcgcccagacaccgacgctgtttggcgatacggtatacgataatctgatctttccctggcagatccgtaaccggcagcctgacccagccatttttctcgattttctcgaacgcttcgccttgccggacagcattttgacgaagaatatcgccgagctatctggtggtgaaaaacaacgcatcagtttgattcgtaacctgcaatttatgccgaaggttttattgctggatgaaataaccagtgcgctggatgaaagtaataaacataacgtcaatgagatgatccatcgttatgtgcgcgagcaaaatattgccgtgctgtgggtgacacacgataaagacgaaattaatcatgcggataaagtgattacactgcaaccgcatgccggagaaatgcaggaagcacgctatgaactcgcataactaaagaaatgcaggaagcacgctatgaacagccataatattactaacgaaagtttagcactggcattaatgctggtggtggtggcaatcttaattagccataaagaaaaactggcgctggagaaaaatattctctggagcgtcgggcgagcgataattcagctgattattgtcggctatgtgctgaagtatattttcagcgtggatgatgccagcctgacattattgatggtgttatttatctgctttaatgcggcgtggaacgcgcaaaaacgcagtaaatatattgctaaagcttttatcagtagctttattgccattacggtcggggcgggaattaccctggcggtgctgattctcagtgggagcattgaatttatcccgatgcaggtgatccctatcgccgggatgattgccggtaacgccatggtagcggtggggttgtgttacaacaatttagggcaacgggtcattagcgaacagcaacagattcaggagaaactgagtcttggtgcgacgccgaagcaggctagtgcgatattgattcgcgacagtattcgcgcggctttaattccgacggtcgatagtgcaaaaacggttggcttagtgagtttaccaggaatgatgtccgggctgatatttgccgggattgatccggtgaaggcgattaaatatcagattatggtgacctttatgctgctcagtaccgccagcttgagcaccattattgcctgctatttaacctatcgtaagttttataatagccgccaccagttggtggtgacgcaattgaagaagaaatgatgcgatgccggatgcgcagcatcgcatccggcgttgtggttcatgtgccgatcaacggaatatcaatacaacaatgcatacagctggcggcgatacttgctcgccagtgcatcacccgtacccagcgcagcgaggatctcctggaacgttttacgcgtctgaccgtctgcggcggtgagatctttacgcagatgcccgaacagcaactccagcgcctcttcattgcgcccaacctgatgcagttgcagcgccagttgcgtcgccagtgcggcatcttctggattctccgccacctgctgttgcaactgttgaatttccggcgtatcagccgcctgcttcagcagttcgatttgcgccaccagcccctggtagcgggtgtcctgatcctgcaacggaatggttttcagcaccgcttccgcatcttcagaacggttcagcgcaatcagcgtttctgccagcagcaggccgatctccccgttctgattgctcaactgccaggcgtctttcagcaatggcagggcatcggtgtaattgctttcctgcatcagttgcatcgcctgctgcgctttcagctcttcttcgcgcggcagcactttatccagcagggcgcggatcgcctcttccggttgcggcccctggaagccatctaccggttgcccgttctggaacagatacacggtcggaatcgcacgcagaccaaactgcgcggcaatcatctgctccgcgtcgcagtccagcttcgccagaataaattgcccgttgtactgcgccgcgaggctttccagaattggggttaactgcaaacagtgctggctacgttcagaccaaaaatagaacagcaccggagtggtcatgctctgttcaagaacctgttgcaggttagattcgttaatgttgacaatattttctacggacatggagtcgctctctgttgtcgatattttctttgacatgggggcttaagcgcgcgcttcaactcacccctgcaatattttgtccatcacgcgccccggcagcaggcgcttaagcaccattaccgcccaggtcaccagcgtcaccggatagcgcatcttcggcttctcgctaataaaagcatggcgtactttgtccaccaccgcttccggtcccaacgtaaagcgggcggcgatgccgggattttcgactggtttatcactttgcgtctggttgacgttgtcggtgaagcgagtacgaatgggaccgggttcgatcaggctgactttaattccgctgtggcgcagctccatgcgcagtgcatcactccacgcctccagcgcatatttactggccgcgtaagcgccacgacccggcgtggagattaatcccatcacgctacttgtcatcacaatacgcccttcaccgtgcggtaacatcgcgggtaacaggcgcatggtgagctggtgtgcgccgaaaaagttggcggaaaactgctgttccatctgcgcacggctgatggtggaaagggggccatacatgccgaatccggcattgttaaagatcccatacagacaattatcggtcagggcgatcacctcgtcggctgcgcgatcaacactttctggactatccagatcgatcaacacgccggtaaatcccatgctgttcatgcgctcaacatcatccggtttccggcaacctgccagcacatgaaaaccctggcgttttaattcgagcgcgctttccaggccaattccactggaacatccggtaattaagacgcttttttgcataactttacctgtcaggatctccgttgctttatgagtcatgatttactaaaggctgcaacttatttaactgtcatgatttactaaaggctgcaactgcttcgccatccagtcggcaataaacggctgggcgtcgcggttgggatgaataccgtcatcctgcatccattgtggcttgaggtagacctcttccataaaaaagggcagcagcggaacatcaaactctttggcgagtttggggtaaatggcgctaaaggcttcattataacggcgaccatagtttgcaggcagacgtatttgcattaacaatggttcagcgttggcggctttgacatcctgcaaaatctggcgcagcgtttgctcggtttgctgtggctgaaaaccacgcaaaccgtcattgccgcccagttcaaccagcacccaacgcggctgatgctgtttcagcagagccggaaggcgcgccagtccttgttggctggtgtcgccgctgatgctggcattaactacgctcgttttactctgccacttatcattcaacaaggcaggccaggccgcgctggcagacattcgatacccggcgctcaggctatcacccagaatcaataacgtgtccgctgcggcggcacggaaggttaacaggaccaggaacaggaagggcaaatgccagcggaaaacattgttgaagttcatcatcttaagaagtccgtcggtcagggggagcatgaactctccatcctcaccggagttgagctggttgtcaaacgtggcgagaccatcgcactggtgggcgagagcggaagcggtaagagtaccttgctggcgatcctcgccgggcttgatgacggcagcagtggcgaagtgagtctggtgggacaaccgctacataatatggacgaagaagcgcgggcaaagttgcgcgcgaagcacgtcggctttgtttttcagagttttatgttaattcctacccttaacgcgctggaaaacgtcgagcttccggctctgctgcgcggtgagagtagcgcggaaagtcgtaacggggcgaaagcgttgctcgaacagttagggctgggtaaacgtctggatcatcttccggcacagctttccggcggtgaacagcaacgagtggcgctggcacgagcctttaatggtcgacctgatgtgctgtttgccgacgaacccaccggcaaccttgaccgccagacgggcgataaaattgccgacctgctgttttccctcaaccgtgaacatggcaccacgttgattatggtgacccacgacctgcaactggcggcacgctgcgaccgctgcttacggctggtgaacgggcagttgcaggaggaagcatgattgcacgttggttctggcgcgaatggcgtagcccgagcctattaattgtctggctggcgctaagcctggcggtggcctgcgtgctggcgctgggcaatatcagcgatcgcatggagaagggcttaagccagcaaagccgtgagtttatggcgggcgatcgggcgttgcgcagtagtcgcgaagtgccgcaagcgtggctggaggaagcgcaaaagcgcggcctgaaagtcggcaagcagctgactttcgccacaatgacctttgcaggcgacacaccgcagctggcgaacgtcaaagcggtggatgatatctacccgatgtatggcgatctgcaaactaatccccctggcctgaaaccgcaggcgggcagcgtattgctggccccacgcctgatggcactgcttaacctgaaaacgggcgacaccattgacgtgggcgatgccaccttgcggattgccggagaagtgattcaggaaccggattccggttttaaccccttccagatggctccgcgtctgatgatgaatctggcggatgtcgataaaaccggagccgtgcagccggggagtcgggtcacctggcgttataaattcggcggcaacgagaaccagctcgacggctatgagaaatggttgttacctcagcttaaacccgaacaacgctggtacggtctggaacaggacgaaggcgcgctggggcgaagcatggaacgcagccaacagttcctgctgcttagcgcgcttctgaccttgctgctggcagtggcagcggtggcggtagcgatgaatcattactgtcgcagtcgctacgatctggtggcgatcctcaaaacgctgggggcagggcgagcgcaactgcgtaagctaatcgtcggtcagtggttgatggtgctgacgcttagtgccgttaccggtggggccataggcctgttgttcgaaaacgtgttgatggtgctgctcaagcccgttctgcctgctgcactaccgccagccagcctctggccgtggctgtgggcgcttggcaccatgacggtcatcagcctgctggtggggctacgaccatatcgcttgttgctggcaacgcagcctttacgcgtattacgtaatgatgtggtagcgaacgtctggccgctgaagttttatctgccgattgtcagtgtggtggttgtgctgctgctcgccggattaatgggtggcagcatgctgctttgggcggtgctggcgggcgcggtagtactggctttgctgtgcggtgtgctgggctggatgctgctgaatgtacttcgccgcatgacgctgaaaagcctgcctctgcgcctggcggttagccgcctgttacgtcagccgtggagtacgttaagtcagcttagcgcatttagcctctcctttatgctgctggcactgctgctggtgttgcgtggcgatctgctcgaccgctggcagcagcagctacctccagaaagcccgaactactttttaattaacatcgccacagaacaggtagcaccgctaaaagcgttcctcgcggaacatcagatagtcccggaaagcttttatccggtggtgcgggcgcggctgacggcgattaacgataagccgacagaaggtaatgaagatgaggcgcttaaccgcgaactcaatcttacctggcaaaatacgcggcccgatcataatccgattgtcgccggtaactggccgccaaaagccgatgaagtgagcatggaagaggggctggcgaaacgcttaaacgttgccctcggtgataccgtgacttttatgggcgatacccaggagttccgcgctaaagtgaccagcctgcgcaaagtggactgggaaagtctgcggcctaatttctattttattttccctgaaggggcattagacgggcaaccgcagagctggcttaccagtttccgctgggagaatggcaacggcatgttgacacaactcaaccgccagttcccgaccattagcctgttagatattggcgcgattttaaaacaggtcggtcaggtgctggagcaggtaagtcgggcgctggaagtgatggtggtactggtcaccgcctgcggtatgttgctgttgctggcacaggtgcaggtgggaatgcgtcagcgtcatcaggagctggtggtgtggcgcacactcggtgcggggaaaaaactgctgcgtaccacgttgtggtgtgagttcgccatgcttgggtttgtttccggcctggtggccgcaattggtgcggaaacggcgctggcagtgttgcaggcgaaagtgtttgattttccgtgggagccagactggcgattgtggattgttctgccgtgcagcggagcgctgctgctgagccttttcggcggctggctgggtgcgcgactggttaagggtaaggcgctgttcaggcagtttgcggggtgatgagagtccctcattaccgcgccttaacccattccgccacttccgcccactcaccgcgaaagacaactttttccgcttttttctcaagctgatagcgatacatcgggtcgtaatattcttcaagtaacggcaccagccaggccagatgaccgtcggtgctgccggtggtgagttgcgttgtcagtgctgcatccagccttgcagccagttcgttatagcgctgtagccccagccgacgcttaatcgcgctaagtccgtgatgcaggtattcgcaatactcctgccagccctgttcgtcgccgtacgcgtgggtaaaatcatgatgcatacgcaagaaatactcttcgttcaggcgctcaagacggatctcaaacggatcttctaccaccgcaatcgccgcctgagtcattcgctcgcgcaggcattccggcaggtgattgctaccgatcatccggctttcgtcttccagcacccacaggcgcaaattctgacgggcgtcggtttttagcatttcggcagccagcaggttttcaaaactcgcctggctaagttgtggttgtaacgtgcgaccaaacgcgctaccgcgatgacgcgccaacccttccagatcaacaccgttcggctgttgctgcactaacagcgttttaccgctgccggtacaaccgccaatcagcactatcggtttttgtgccagttcaatagtcgcctgaatcgcggtctggcgcagtgccttataaccgccttccaccagcggataatcaatccccgctgcatgcaaccagctttacacaatatgactgcgctgaccgccacgggcgcagcagagaataccttgcggattttgcaggcacgctgcccgccaggcgtccatgcgctgctgacgaatttcacccgccaccagtttatgtcccagcgccagcgctgcgtcactgccttgctgtttatagcaggtgccaacggcggcgcgttcatcgttattcattaacggcagattgatagcggcgggcattgcgccgtgctcaaactcgataggggcgcgaacatcaataatgggcgtatcagcaatcagcagggcacgatagtcctgttccgtgtgtctctcttgcatagttaaaagtgaacctcaaatcagcttgcgcgctattttacgcgccaacgcgcaaggaaacttgatttttaactgcgtgggttgccgaaaatttctaaaaatccgctgatttccggcctgcgctgggtaaacaaggtcacaatatcttctaccgctttgccgctgccaaatttgcgccatgccagactcaatgggctaggagggcgcatcgttgggattacccggctgaccagttgttgattatcgatcatactctggcaaaggctttttggcaaaaaaccaatgccaacgcccgccagatgggcggcgattttcgtttccatatcgggaacaataatctctttttgccctggcaatcgccaggcgacgcgtttggttaaggtgcgggcgctgtcttcaatattgaccgccggaaagcgccgcaactgcgcttctgttagcggctcttcaacgttcgccagcggatgatccgccgccatgacaaagcgccattgcacgcttcctaagggatcaagactaaaggtatttgccagcgcctcagttcccgtgacgccgatagccaggctaaaaccttcgtacaataggctgtcccagacgcccatatagatttgtcgggagatgtgaaactgggtaaaggggtaacgctcattcagccacgccagcaactgggcgacggcctgggggttatagagcaggttgttgatgacaatattcacctggcgttccacgccatcattcacctgttgcagctcgcttggcatactttccagccagctcagccagtctctggcctgggaaagtagatgctcgccagccgctgtcaacgtcacgctgcgagtcgtacggaaaaacagcgctactccggtattctcttccagaagtttaatgcgataactgatcgtcgccgtggttttacataatcgttctgccgctttactaaaacttcctgtttcagcaaccgcaatgaaagtccgcaaggtttctggatcgaacatcttcaggtatccccttttaaatccgcaagttgcgtgattttcttatcctctgatttatcagtatttttacatgataaccctgttcaatttgtggactaaatctagttttggaaaaatattccaacttttgtattgatgttgttctcttaaggttttagattgcctgttattgaaaccaagctgaccggtcggcggtggttgaacggaattatgttacaaggacaaaaagatgaaacttcaggtattaccgttaagtcaggaagcctttagtgcttatggcgacgtaatcgaaacgcagcaacgggattttttccatattaacaatggcctggtggagcgttaccacgatttggcgctggttgagattcttgagcaagactgtacgcttatcagcattaaccgcgcgcaaccggcgaatctgccgctgaccattcacgaactcgaacgtcatccgctgggtactcaggcctttatcccgatgaaaggtgaggtgtttgtggtggtcgtggcgttaggtgacgacaaaccagacctgagtacgctgcgggcgtttatcaccaacggcgaacagggagtgaattaccatcgtaacgtctggcatcacccacttttcgcctggcagcgcgtcaccgattttctgaccatcgatcgcggcggcagtgacaactgtgatgttgaaagtattcctgaacaggaactctgttttgcgtgacgcctgcaaccgacttgcataagataaactaattgttcattgtttatgctcacttgtaggtcggagttaacgtaggtatgacggaagttagacggcgcggcaggccaggacaggcggagcctgtggcacagaagggcgcacaggcgttagagcggggaattgcgattctgcaatatttggaaaaaagtgggggaagtagcagcgttagcgatatttctctcaatctggatttgccgctctccacgacctttcgcttgctgaaggttttacaggcagcggattttgtctatcaggacagtcaattaggctggtggcatataggattaggtgtctttaacgtcggtgcggcgtacatccataaccgcgatgtcctctccgtcgccgggccgtttatgcgccgcctgatgttactttccggcgaaacggtcaatgtcgcgatccgtaacggcaatgaagcggtattaattggtcagttagagtgtaaaagcatggtcaggatgtgtgcgccactgggcagtcgtctgccactgcatgcttccggtgcgggcaaagcgctgctttatccgctggcggaagaggagttgatgagcatcattctgcaaaccggtttgcagcagtttacgccaactacgcttgtggatatgcccaccttgctgaaggacctggaacaagcgcgtgaactgggctataccgtagataaagaagagcatgttgtaggtctgaattgcatagctagtgcaatttacgatgatgtcggtagtgttgttgccgctatctccatctccgggcctagtagtagactgacagaagatcgttttgtcagtcagggtgagctggtcagagacaccgcccgcgatatcagcacggcgttgggactgaaagcacatccataatgtctgtcgcatcccgctctgcggagcgggtttttttgacaaaatttgaaagttggaaaaattttccaataaatagaggtaggaataaaatggcaaaaatgagagccgttgacgcggcaatgtatgtgctggagaaagaaggtatcactaccgccttcggtgttccgggagctgcaatcaatccgttctacagtgcgatgcgtaagcacggcggtattcgtcacattctggcgcgtcatgtggaaggtgctagccacatggcggaaggttatacccgcgcaacggcagggaatatcggcgtatgtctggggacttccggtcctgcgggcacggacatgatcaccgcgctctattccgcttctgctgattccattcctattctgtgcattaccggccaggcaccgcgcgcccgtctgcataaagaagattttcaggccgtagatattgaagcaattgctaaaccggtcagcaaaatggcggttacagttcgtgaagcggcgctggtgcctcgcgtgctgcaacaggcatttcacctgatgcgttctggtcgtccgggtccggtactggtggatttaccgttcgacgttcaggttgcggaaatcgagtttgatcctgacatgtacgaaccgctgccggtctacaaacctgctgccagccgtatgcagatcgaaaaagctgtagaaatgttaatccaggccgaacgtccggtgattgttgccgggggcggggtaattaatgctgacgcagctgcactgttacaacagtttgctgaactgaccagcgttccggtgatcccaacgctaatgggctggggctgtatcccggacgatcatgaactgatggccgggatggtgggtctgcaaaccgcgcatcgttacggtaacgcaacgctgctggcgtctgacatggtgtttggtatcggtaaccgttttgctaaccgtcataccggcagcgtagagaaatacaccgaagggcgcaaaatcgttcatattgatattgagccgacgcaaattggtcgcgtgctgtgtccggatctcggtattgtctctgatgctaaagcggcgctgacactgctggttgaagtggcgcaggagatgcaaaaagcgggtcgtctgccgtgtcgtaaagaatgggtcgccgactgccagcagcgtaaacgcactttgctgcgcaaaacccacttcgacaacgtgccggtgaaaccgcagcgcgtgtatgaagagatgaacaaagcctttggtcgcgatgtttgttatgtcaccaccattggtctgagtcaaatcgctgcggcacaaatgctgcatgtctttaaagaccgccactggatcaactgtggtcaggctggtccgttaggctggacgattccggctgcgctaggggtttgtgccgctgatccgaaacgcaatgtggtggcgatttctggcgactttgacttccagttcctgattgaagagttagctgttggcgcgcagttcaacattccgtacatccatgtgctggtcaacaacgcttatctggggctgattcgtcagagtcaacgcgcttttgacatggactactgcgtgcaactcgctttcgagaatatcaactccagtgaagtgaatggctacggtgttgaccacgtaaaagtagcggaaggtttaggttgtaaagctattcgggtcttcaaaccggaagatattgcgccagcctttgaacaggcgaaagccttaatggcgcaatatcgggtaccggtagtcgtggaagttattctcgagcgtgtgaccaatattagcatgggcagcgaactggataacgtcatggaatttgaagatatcgccgataacgcagcggacgcaccgactgaaacctgcttcatgcactatgaataagggagataaataatgttacgtttctctgctaatttaagcatgttatttggagaatatgattttctcgcccgttttgagaaagctgcgcagtgtggttttcgcggcgttgaatttatgtttccttatgactacgacattgaagaattaaaacatgtgctggcgagtaataaactcgaacatacgctgcacaatttaccggcgggtgactgggcggcgggggagcgcggtattgcctgtattcctggccgtgaagaagagtttcgggatggcgtagcagcagcgattcgttatgcccgtgcgctgggtaataaaaaaattaactgtctggtcggtaaaacgccggctggtttcagcagtgaacagattcacgcaacgcttgtagaaaacctgcgttatgccgcgaatatgctgatgaaagaagatattttattactgattgaacctattaaccattttgatattcctggtttccatctcaccggaactcggcaggcgctgaaattgattgatgatgttggttgctgcaatttgaaaattcagtatgacatttatcatatgcagcggatggaaggtgaattaaccaacaccatgactcagtgggctgataaaattggtcacctgcaaattgccgataatccgcatcgcggcgaaccgggaaccggagaaattaattatgattatctctttaaggtaatcgaaaattctgactacaacggttgggttgggtgtgaatataaaccccaaaccaccacggaagccggtttacgctggatggatccgtaccgttaaaacgtaacgctattcagacaatgcttttttaggccgctaagttggcaggggatcgtgttgtctgaattcaggaaaagcgaaatttaaaagaggttaattatgaaactgggatttattggcttaggcattatgggtacaccgatggccattaatctggcgcgtgccggtcatcaattacatgtcacgaccattggaccggttgctgatgaattactgagtctgggtgccgtcagtgttgaaactgctcgccaggtaacggaagcaagcgacatcatttttattatggtgccggacacacctcaggttgaagaagttctgttcggtgaaaatggttgtaccaaagccagcctgaagggcaaaaccattgttgatatgagctccatttccccgattgaaactaagcgtttcgctcgtcaggtgaatgaactgggcggcgattatctcgatgcgccagtctccggcggtgaaatcggtgcgcgtgaagggacgttgagcattatggttggcggtgatgaagcggtatttgaacgtgttaaaccgctgtttgaactgctcggtaaaaatatcaccctcgtgggcggtaacggcgatggtcaaacctgcaaagtggcaaatcagattatcgtggcgctcaatattgaagcggtttctgaagccctgctatttgctagtaaagccggtgcggacccggtacgtgtgcgccaggcgctgatgggcggctttgcttccagtcgtattctggaagttcatggcgagcgtatgattaaacgcacctttaatccgggcttcaaaatcgctctgcaccagaaagatctcaacctggcactgcaaagtgcgaaagcacttgcgctgaacctgccaaacactgcgacctgccaggagttatttaatacctgtgcggcaaacggtggcagccagttggatcactctgcgttagtgcaggcgctggaattaatggctaaccataaactggcctgatacccgcaataaaaatggccgatatcagaaaatgaatcggccagcaatattaaaaaagaaagcagccaaagatgttgctagtgtattaaaaataatatttttattttatttgttcctcatagctagattaaaacaacgttatagcatacgtgaaattaagagggatttatggaacatcagagaaaactattccagcaacgcggctatagcgaagatctattgccgaaaacgcaaagccagcggacctggaaaacatttaactattttaccttatggatgggtagcgttcataacgttcccaattatgtgatggtcggcggcttttttattctcggcttgtctacctttagtattatgctggcaattatcctcagcgcctttttcattgccgcggtaatggtattaaacggtgctgcgggcagtaaatacggtgtgccttttgccatgatcctgcgtgcttcttacggtgtacgtggtgcactgtttcccggattattaaggggcggaattgccgccatcatgtggtttggtttgcaatgttacgcggggagtctggcctgcttgattctgattggcaaaatctggccgggatttttaactctcggtggtgatttcactctgttaggcctttctctaccgggcttaattactttcttaatcttctggctggtcaacgttggtataggttttggcggtggcaaagttttaaataaattcactgccattcttaacccgtgcatctatatcgttttcggcggtatggcgatttgggcgattagtctggtcgggatcggtccaatctttgactacattccgagcggtattcagaaagcagaaaacggtggcttcctgttcctggtggtgattaacgcggtagttgcggtctgggcggcaccggcggtgagcgcatccgactttacgcaaaacgcccacagctttcgtgagcaggcgctggggcaaacgctgggtttagttgtggcctatattctgtttgcggtcgccggggtatgtattattgccggagccagtattcactacggcgctgatacctggaacgtgctggatattgttcagcgttgggacagcctgttcgccagcttctttgcggtactggttattctgatgacaactatctccactaacgcgaccggtaatattattccagccggttatcagattgccgccattgcaccgacaaaactgacctataaaaacggcgtactgattgccagtattatcagcttgctgatctgcccgtggaaattaatggaaaatcaggacagcatttatcttttcctcgatattatcggcggaatgcttggtccggtaattggtgtcatgatggcgcattattttgtggtgatgcgcggacaaattaatcttgatgaactgtataccgcacctggcgattataaatattacgataacggttttaacctcactgcgtttagtgtaactctggtggccgttattttatctcttggcggtaagtttattcactttatggaaccgttaagccgtgttagttggtttgtcggcgtcatcgtcgcctttgcggcctacgccttattaaagaaacgtacaacagcagaaaaaacaggagagcaaaaaaccataggttaattaatcccgatattgaacattgagttaaaaaccaatctgtattttacaaggagtttgttatgtcttttgatttaatcattaaaaacggcaccgttattttagaaaacgaagctcgcgttgtagatatcgccgttaaaggcggaaaaattgctgctatcggtcaggatctgggcgatgcaaaagaagttatggatgcgtctggtctggtggttagcccgggcatggttgatgcgcacacccatatttctgaaccgggtcgtagccactgggaaggttatgaaaccggtactcgcgcagcggcaaaaggtggtatcaccaccatgatcgaaatgccgctcaaccagctgcctgcaacggttgaccgcgctagtattgaactgaagttcgatgccgctaaaggcaagctgactattgatgcggcacaactcggtggcctggtgtcttacaacatcgaccgtctgcatgagctggatgaagtgggcgttgtcggcttcaaatgcttcgttgcgacctgtggcgatcgcggtatcgacaacgacttccgtgatgtaaacgactggcagttcttcaaaggtgcgcagaagctgggcgaactgggtcagccggtgctggtgcactgcgaaaacgcgctgatttgtgacgaactgggcgaagaagcgaagcgtgaaggtcgcgtaaccgctcatgactatgtggctagccgtccggtatttaccgaagtggaagcaattcgccgcgtactgtatctggcgaaagttgctggttgccgtctgcacgtttgccacgtcagcagcccggaaggtgttgaggaagtgactcgtgcacgtcaggaaggtcaggacgttacttgtgaatcctgcccgcattactttgtactggataccgatcagttcgaagaaatcggtactctggcgaagtgtagtccgccgatccgcgatctggaaaaccagaaaggcatgtgggaaaaactgtttaacggtgaaatcgactgcctggtttccgaccactctccatgcccgccggaaatgaaagccggtaacatcatgaaagcatggggcggtatcgccggtctgcaaagctgcatggacgtgatgttcgatgaagcggtacagaaacgcggtatgtctctgccaatgttcggcaaattaatggcgactaacgcagcagatattttcggtctgcagcaaaaaggccgtatcgccccaggaaaagatgccgacttcgtcttcattcagccgaatagcagctatgttcttaccaatgacgatctggaatatcgccacaaagtcagcccgtatgttggccgtaccattggcgcgcgtatcacgaaaaccatcttacgtggtgatgtgatttacgacattgaacagggcttccctgttgcgccgaaaggtcaatttatccttaaacatcagcagtaatctggcccctgcaatgcccgtccttgcggcgggcattctccggttaaggtgtgtttatgttcaattttgcagtcagccgcgaaagcctgttaagtggatttcagtggtttttctttattttttgcaacacggttgtggttcctcctacgctactttctgcttttcagttgccgcaaagtagcctgcttacgctcacgcaatatgcttttcttgctaccgcactggcctgcttcgctcaggcgttttgcggtcatcgtcgcgctattatggaagggccaggtggcctgtggtggggaaccatccttactatcacccttggtgaagcaagccgcgggacaccgatcaacgatatcgccaccagcctggcagtggggattgcactctccggcgtgctgacgatgttgattggttttagcggattaggccatcgcctggcacggttatttacgccgagcgtgatggtcttgtttatgttgatgctgggcgcgcagctgaccactatctttttcaaaggtatgctcgggctgccgtttggcatagccgacccgaattttaaaattcagttaccgccgttcgcgctcagcgtggcggtgatgtgcctggtactggcgatgattatcttcctgccgcaacgttttgcccgttatggcctgctggtcggcaccataaccggctggttgttgtggtacttttgctttccttctagccacagcctctccggtgagttgcactggcagtggttcccgctcggcagtggcggtgctttgagcccgggaattattctgacggcggtgattacaggtctggtaaatatcagcaatacctacggtgcgattcggggcacggatgttttttatccgcagcagggcgcagggaatacgcgttatcgtcgtagctttgtggcgaccggatttatgacgctgataaccgtaccgctggcggtaattccatttagtccgtttgttagttccattggtttattaacccagactggcgattacacgcggcgtagctttatttatggcagcgttatttgcctgctggtggcgctggttcctgcactcacgcgactgttttgcagtatccctttacccgtgagtagtgcggtcatgctggtttcttatctgcctttactcttttccgcgctggtgtttagccagcaaataacgtttaccgctcgcaatatttatcgactcgcattgccgttatttgtcggcatatttttaatggcattaccgcctgtgtatctgcaagaccttccattaacgcttcgtcctctgctcagtaacggcttattggtcgggattttactggctgttcttatggataaccttattccgtgggaacgcatcgaataatttgttgaaaaaggattgataatgaagattgtcattgcgccagactcttttaaagagagcttaagtgcagaaaaatgttgtcaggcaattaaagccgggtttagcaccctctttcccgatgcgaactatatctgtttgccgatagcggatggcggcgaagggacggtggatgcgatggtcgccgcgacgggcggcaacatcgtgacgcttgaagtctgcgggccgatgggcgaaaaagtgaatgctttttatggccttaccggcgacgggaaaacggcggtgattgagatggcggcagcaagtggcctgatgctggtcgcgcctgaaaagcgtaatccgttgctggcctccagttttggtacgggggagttaattcgtcatgcgctggataacgacattcgccatattattctcggcattggcggcagtgcgacggtcgacggcggtatgggcatggcgcaggcgctcggtgtgcgtttccttgatgccgacggtcaggcgctggcggcaaacggtggtaatttagcgcgcgtggcaagcattgagatggatgaatgcgatccgcgtctggcgaattgccatattgaagtagcatgtgacgttgataacccgctggtaggggcacgcggcgcggcggcggtgtttggcccgcaaaaaggggcaacgccggagatggtcgaagaacttgaacaggggctgcaaaattacgcccgtgttttacaacagcaaactgaaattaatgtctgccagatggcgggcggcggcgctgcgggcggtatgggtattgcggcggcggtatttctcaatgcggatattaaaccgggcattgaaattgtgttgaatgcggtcaatcttgcgcaggcagtgcagggcgcagcactggtgattaccggggaagggcgcatcgacagccaaacggcaggcggtaaagcgccgctgggtgtggcgagcgtggcgaagcagtttaatgtaccggtgattgggattgctggcgtattgggtgatggcgtggaagtggtgcaccagtacggcattgacgcggtattcagcattttgcctcgtctggcacctttagccgaagtgctcgccagcggtgaaaccaatctcttcaacagcgcgcgaaatattgcctgcgccattaaaataggtcagggaattaaaaactaacccttacctttaaagcggatgcgatttatatcgcataagagtgcagtactcatgccggatgcggcatgagtaccatatccttcctgaaaatcgcgcaaattctatatattgcagagatcatgtaggcctgataagcgaagcgcatcaggcaatgttacaaaaaaagccacggtataaaccgtggcaaaatccaacatagctaaaaataatcaggcgagtggtatgacttaaatctctacgtcgcggttacaatctttgctgtaaatatagctgaacgcttcaccacgccctacaccataaccagcctgtaaagaataagcgcccataaagatgtaatcgccttttttcaccgggatccagttattgtcgaggttataaaccccctgaccggaaagaatataggcaccgtgttcctgaacgtgtgtttcgatataaccgtggctggcacctggtgcaaaagagaggatatgcatgttcatatcaaaacctaactctttgggcagaaaatccagcagaataacatcgtccatgccttcataatgaatgcgttccagttcgctggcattgccagaaaccagccacggtgcatagccttctaccggaacatagcggcgcttatataaaaagatttggctgtcttcggcctgggcgttaacaaacgtcattaaggagcctggcgggcaataaagatagccaccttcgcttaaggcaaatgttttgccttcggctttggcagtgatatttccagagatcacatacaggaacgtttcaatgccttcgccaccgaagccctgttggttgccaccgttttgatgcagtgtgaccagataatcaacaaaagaggcacccagctttggcgtggagaggattgtcgcgtcacaattttcaaagcccggaataatattttttaccagaccatccggggttaacagtgcgaaattaccgtgtttaacaatcgcacggttagccagtaaatcttcgcggtaaccggtgacgttatttaaatatcccatttatgactccttatttctgccaggcaagttgataaagcatgagtgccaacgttttgaccccttcggcaaggtcggtaatattggtgcgttccgccgggttatggctgatcccgttgatgctggggataaaaatcatgcaggttggtacgcgaggcgcgaaaatttgcgcgtcgtgcccggcaccactgtgcatcacccggtaattcagtttttctctttcacacaattctgtcagggtggcgaccagctccttattcatcggcacgggttcttcgtccatccataaatcgatatcaataccaatgtccatttcatcgcaaatcgcccgcatgtcgttttctaactgttgggtgaaatcgcgcagcacggcagcgtcggtatgacgacaatcaatggtgaacgtggttttacccggcaccacatttaccgtattcgggcgcggctctactttgccaaaggtcagaaccagcggatcgcccatccttttcgctttttcgacgctctgatggcaaatgcgactgaaagcgtaaactgtatcacgacgataacccatcggcgtggtgcctgcatggttactttcgccgttcagcgttaccgtataacgacgctgcccgacaattgcattcaccacgccaatactttgcccattactttccagcacacagccctgttcaatatgcagttcaacaaaggctttaatatcctgacgcggagttagtggggcgttcggaagagtaaatccgcaagccttcatcgcatcgacaaaactatttcctttggcatcacagatattccgcacgtcgtcaggattcgccagcccaaaaatatttttactgccccagaagacatacgggaagcggctgccttcttcttctgccatcgccaccacttcgaccgtacgtagcggcgcgccgtattgcgttttcagccagtcaattgccagccacgccgccagcgcgccgaattgcccgtcaaggttaccgccgttaaccacggtatcgatatggctaccgctcagaaccacttcctgtggatattcggtgccattcaggcgaccgtataaattccccacttcatcgaaacgtgtttccagcccgcttgctgccattctttttttaaattgctgctgggtttccagccattccgggctataaagtaaacgggtcatcccacccgctgggtcagcgccaaaagaggaaagccagggcagcgtttcttctatagcttgacggaaatgtgtaatcataagaaagtcctgtctcaataattattgcgcaaagggatttttcgtttcgtaactcgtgttataaagcgcgtcggaaattaaatactggtaaatatcatcaacaatttcgatgccttcgacggcggctttgcgttgtttaatatcctgatcctgtccgggataataaacctgattaaaaccgggcgcgggggtaatggcatttaattcgcgcatggtctggctaagatgttgacggaataattcgctggaggagaaaaagttcggattaataactatatgtaattgccccaaattacgccctgcgtgtaaatcgtcatacatgctactaacctgtcgcccgaacggtaagccgagtaagacgccactgaggacgtcaatcatcatcatcaggccatacccttttggcccggcggcggggagcagagcatgtaccgcgaacggatcggttgttggtacaccgtttttatcgaccgcccaggtatccgggatagacatattacggctgcgggcgtcgagcacttttccccatgcctgtacggtagtcgccatatcaaaggtaaggatctcgtcgccttctcccggcgcggcaaaggccagggggttagtaccgtagtaaatttccgcgccgccaaacggcaccaccattggatcggactggcacatgctaatgccaatgaatccggcgcgggctgcctgctgcacaaaataagagattgcgccgctgtgacccatccggctgataccgaccaccgcaacgccattttgctgggcggttttgatggcatgttccatacccattttcgccgcgacctgtccggcggcattgtcggcatgtaaaattgcgctgcacggcccggtttcctcaagacgaaactccggttcgcggttggtgccgcctttactaatgcgttccgcgtagtattccacgcgcaccgcgccatgagagtggatccctctggcatcggcgtaaaccaatacttcagccacggttgcagcgtgctcacgttttaacccagcctggcagagtttattctcaattagctggtggagtgtttcccgactgattttcatctgtcttcctttttaacgacggtgtgaagcatgactgcaattaacatacagggaaaatatctggattatgtgatccagacaggcaaaaaaatatagttagaatttatttgataatccgctcacttttaacctgatttttaaaacaacaacgcttattaaaaaataatgagtaatagcctggtggttatttgaattcttttgttaataattcctgtgtgatattcatcaccttatttactcgttgtcatcgataccgtaatcgccacattaacactgctcgtgcaattgccatgggtgcaatttttaaggagttgttatgatccacgcctttattaaaaaagggtgttttcaggatagcgtcagtttaatgattattagtcgaaaactcagcgaaagtgaaaatgttgatgatgtttccgtaatgatgggtacgcccgccaataaagcgttattagataccacaggtttctggcatgacgattttaataacgccacgccgaacgatatttgcgtggcaattcgtagcgaagcggcggatgcggggatcgcgcaggcgattatgcagcagcttgaagaggcgctaaaacaactggcgcaggggagtggcagcagccaggcgttgacgcaggtgcgtcgctgggacagtgcctgtcagaaattacccgatgccaatctggcgctgattagtgtggctggcgagtatgcggcggagctggcaaaccaggcgctggatcgcaacctcaacgtgatgatgttctccgataacgtcacgctggaagatgaaatccaacttaaaacccgcgcgcgggaaaaaggcttgctggtgatggggccggactgcggtacgagcatgattgccggcacaccgctggcttttgctaacgtgatgccggaaggcaatattggcgtcattggcgcttccggtaccgggattcaggagctgtgtagccagattgcgctggcaggggagggaattactcacgcgattggccttggcgggcgcgacctcagccgtgaagtgggcggcatcagtgcgctaacagcgctggaaatgctcagtgcagacgagaaaagcgaagtgctggcatttgttagtaaaccacctgccgaagctgtgcgtctgaaaattgttaatgccatgaaagcaaccggcaaaccgacggtggcgctgtttttaggttataccccggcggtggcccgcgacgagaatgtctggtttgcctccagcctggatgaggccgcacgcctggcttgcctgcttagtcgcgtcacggcgcgacgtaacgcaatagcgcctgtcagcagcggatttatttgcggtttgtataccggcggtacgctggctgccgaagcggcgggattacttgccggacaccttggcgtggaagccgacgatacccatcaacatggcatgatgctggacgccgatagccaccagattattgacctcggcgatgatttctacaccgtcgggcgtccccatccgatgatcgacccaaccttacgcaaccagttaattgccgatctcggcgctaaaccgcaagtgcgcgtgttgctgcttgatgtcgtgattggcttcggtgcgaccgccgatcctgccgccagcctggtgagcgcctggcaaaaagcctgtgccgcgcgtttagataatcaaccactgtatgccattgccacggtgacaggcactgaacgtgacccgcaatgccgcagccagcaaatcgccacgctggaagatgcggggattgcggtcgtgagtagcctaccggaagccaccttgctggcggcagcgttaattcatccgctcagccctgccgcacagcaacacacaccgagtttactggaaaacgtcgccgtgattaacatcggattacgcagctttgcgctggagctacaaagcgccagcaaaccggttgtgcattaccaatggagcccagtcgccggtggcaataaaaaactggctcgtttattagaacgtttgcaataaggggttcccatgtttacatcagtggcgcaagccaatgctgcggttatcgaacaaattcgtcgcgctcgtccacactggctggatgtgcaaccggcttcttcacttatcagcgaactaaacgagggcaaaacactgcttcacgccgggccgccaatgcgctggcaggagatgaccggacccatgaaaggggcgtgcgtgggcgcatgtctgttcgaaggttgggcgaaagatgaagcgcaggcgctggcaatactggagcagggggaagtgaacttcattccttgtcaccatgtgaatgccgtcgggccaatgggcggtattacttctgccagtatgccgatgctggtggttgagaacgtgaccgacggcaaccgggcgtactgcaacctcaacgaaggtatcggcaaagtgatgcgttttggcgcttacggcgaagatgtcctgactcgccatcgctggatgcgcgatgtgttaatgccagtattaagcgcggcgctggggcgcatggagcgcggtatcgatctcacggcgatgatggcgcagggcattacgatgggcgatgagttccatcaacgcaatattgcttcctctgcactgttaatgcgtgcgctggccccacaaattgctcgcctcgatcatgataaacagcacatcgccgaagtgatggatttcctcagcgtgaccgatcagttcttcctcaacctcgcgatggcttactgcaaggcggcgatggatgctggcgcgatgatccgcgcaggcagcatcgtcacggcaatgacccgcaacggcaatatgttcgggattcgggtaagcgggctgggcgaacgctggtttactgcgcctgtaaacactccgcaaggtctgtttttcaccggcttctcgcaggagcaggcgaacccggatatgggcgatagcgcgattaccgaaacctttggtatcggaggtgcggcaatgatcgcagcgcctggcgtaacgcgctttgtcggtgcgggtggcatggaagcggcaagagcggtatctgaagagatggcggaaatttaccttgaacgcaatatgcagttgcagatcccaagctgggattttcagggcgcgtgcctggggctggacattcgtcgcgtggtagaaaccggcattacgccactcatcaataccggtatcgcccataaagaggcggggatcgggcagattggcgcaggcaccgtgcgggcaccgctggcgtgctttgaacaggcgctggaagcactggctgaaagcatgggtattggttgaggaacgcgcaatgacgatcatccatcctctgcttgccagtagtagcgcaccgaattatcgccagtcctggcggttagcgggagtgtggcggcgggcgattaacctgatgacggaaagcggcgaactgttaacgttgcatcgtcagggtagtggtttcggccccggaggatgggtgcttcgccgtgcgcaattcgatgcgttatgcggtggattatgcggcaatgaacgaccacaggttgtggctcaagggattcgcctcgggcgtttcacggttaaacagccacagcgttattgtttgctgcgtattacgccgcctgcgcatcctcaaccacttgcagctgcatggatgcaacgcgcggaggaaaccgggcttttcgggccactggcgttggcggcaagcgatccgctgcctgctgagttacgccagtttcgtcactgttttcaggccgcgctcaatggcgttaagaccgactggcggcactggctgggtaaaggccccggattaacgccgagtcatgatgacacgctgagcggaatgctgctggcggcctggtattatggcgctttagatgcgcgctccggtcgtccgttttttgcctgttccgacaatctgcaactcgttaccacagcggtgagcgtcagttatttacgttatgccgcgcaaggatatttcgccagcccactcctgcactttgttcatgctctgagttgcccgaaacgtaccgctgttgcgattgatagcctgctggcgctggggcatacgagtggggcagatacgctgctggggttctggcttggccaacaattattacaaggaaaaccatgaaaacactggttgtggctcttgggggcaacgccttactccagcgcggtgaggcgctgacggcagaaaatcaatatcgcaatatcgccagtgctgtacccgcgctggcacgcctggcccgttcttatcggttggcgattgttcacggcaacgggccgcaggtggggctgctggcattgcagaatctggcgtggaaagaggtagaaccgtatccgctggatgtgctggttgcggaaagccaggggatgattggctatatgctggcgcagagtttgagcgcacagccgcagatgccgcccgtgacgacggtgctgacgcgcattgaggttagccctgatgatccggcgtttttgcagccagagaaatttattggtccggtttatcagccagaagaacaagaggcactggaagcggcttacggctggcagatgaaacgtgatggtaaatatttgcgccgggtggtggcgtctccgcaaccgcgtaaaattctcgacagcgaagccatcgagttgttgctcaaagaggggcatgtggtgatttgcagtggcggcggcggtgtgcctgtgacggatgacggagcagggagtgaagcagtgattgataaagatctcgccgctgcgttgctcgccgagcagattaatgcagatggactggtgatcctcaccgatgctgatgcggtatatgaaaactggggaacgccgcagcaacgtgccattcgccatgccacaccggatgagttagcgccatttgccaaagccgatggtagcatggggccgaatgtaacggcggtgagtggttatgtcagaagccgtggtaaacccgcgtggattggggcgttaagccgaattgaagagacgctggcgggcgaagcggggacctgtattagcctgtaatcgtaggcattagacatttgtgcctgatgcgacgcttgacgcgtcttatcaggcctacaaccggtgccgcatccggcaattggtgcacaatgcctgatgcgatgcttgacgcatcttatcaggcctacaatgggtaccggatcggtaggccggataaggcgtttacgccgcatccggcaagaatagagcaccagttaaccgaacttactctgcgcccaaatcacgccgctggcatattccggcggcagcagcgggattaaggcttccagcgtcgcagtcagacggcttgtgtcgctgtcggtcaaattcagatgccccactttacgccccggacggacttctttgtcgtaccagtgcagatgcaccagcggcagtttcagccagtcataattcacatcgctaccaatcagattgatcatcacgctcggattattcaccactggttgcggtaacggcagatcggtaatcgcccgcagatgcagctcaaactggctgatgctggcaccgttttgtgtccagtgaccgctgttatgcacacgcggtgccagttcgttgatcaacagaccttgcggggtgacaaaacactccatcgccatcacgcccacatagcccagctcctgcataatcgcgctcagcatctcttcggcttgcgcctgctgctgtgcgttggcctgcggaaaagcgacgctggtgcgcaaaataccgtcctgatgcaggttatgcgtcagcggataaaacacggtgctgccatcaaagccgcgcgcgccaaccaggctcacttcaccagagaagttaatgccctgctcgacaatacattcgccgtaacactctgccggtaactgttcggtttcatttgcgcgtaaacgccattgaccgcgaccgtcataaccaccagtgcgacgcttaacaatcgccagctcacctaaacgatcaaacaccgcaggccactcgctgcgttcggcaagtaactgccacggtgcagtcggcaggtggagcttatcgaaaagctgcttctgagtcagacggtcagcaataatcgggaacacatcgcggttcacaaaggccggatggcgcgccagctcgcgggttaatgcggtttccggccagcgttctatctcagcggtaatcacgctttgttgaaaaggcaccgccgccggttcagcgtccagcccgactggccagacagcaatgcctaacggttcgcctgcctgacgcagcatacggcctaactgcccgttaccgaggacgcaaacctgtttcatgccgcacctcgcgggtccgggttttccagcacttcgtcggtctgggctttgcgccagtcattcagacgctggtgcagttctttatcatgagtcgcaagaatttgtgctgccagtaacgccgcgtttgccgcgccagctttaccaatcgccagcgtacccaccggaatgccgcgcggcatttgtacgatggagtagaggctatcgacaccgctcagtgcggcgctctgtactggcacgcccagcaccggcaccagcgttttggcggcaatcatgcctggcagatgcgctgcgccgcctgcgcccgcaataatcacctgataaccgttctcttcggcgctttcggcgaagctgaacagtttatcgggggtgcggtgagcagaaaccacttcaacgtggtgcgggacattcaggatttcgaagatttcggcggcgaactgcatggtagcccagtcgcttttggaccccatcacgatggcgacacgcgccggattattgcgggaagacatgcgtcttaaaactcctgtggtgcacaactctcggctttagagggcacagagaatagcacggaaagagagcaaggaaaacggttgcgtggctgtgaaatcagcaaagttgcgggttttttaaaacggaaaatgaatcagctcaacgtcatccgccgtgactttcaccatactaccttccgtatgccaggcacccagtaccacgcgaaaagcaggttgctgattggcgataagttcatgcaccgccgggcgatgggtatgcccgtggatcagccattgcacctgatgtttttccatcgcactgaccaccgcgttttggttaacgtccatgatcgccaggcttttactgctgttggcttctttgctgttcgcgcgcattcgcgcggcaatgcgtttgcgcacaaacaacggcagggcgaggaatagcgtctgcagccagggtttgtggaccttggcgcgaaaagcctgataacccgcgtcatcggtgcacagcgtgtcgccatgcataatcaacacccggcgaccataaagttcgagcaccttttcttccggcaataacgtcatgccactttcacgggcaaagcgtttgccgagcagaaaatcacggttgccatgaatgaaataacagggaacgccggaatcggacaccgctttgatcgccgccgccatcttgcgatggagtgggttgggatcgtcgtcgccaatccatgcttcaaacagatcgccaagaatatacagcgcgtcggccttgcgggcttcccccgctaaaaaacgcagaaaaccggcggtgatcgccggttcttccacgcagagatgaagatctgcaataaagagtgtcgccacgattactcgctaacggtcacgctttcaatgataacgtcttcttttggcacgtcctggtgcataccgctacgaccggttgcaacacctttgattttgtctaccacgtccatgccgtcaaccacttcagcaaacacgcagtagccccaaccttgcaggctttcgccagagaagttcaggaagtcgttatcaaccacgttgatgaagaactgtgcagttgcagagtgcggagcctgagtacgtgccattgccagcgtaccacgggtatttttcaggccgttgttggcttcgtttttgatcggttctttggtggctttttgtttcatgcccggttcaaaaccgccgccctgaatcataaagccgttgataacacggtggaaaatggtgttgttgtaaaaaccttcgcggcagtagtccaggaagtttttaactgtttcaggtgctttatcgtcaaaagttttgatgacaatatcgccgtgattggtgtggaaagtaaccatttttgcatcctgttccgtttgattggtgcttcaacccagttcgggtcatatatagggtggtgttatagcataaccgcacgatcggatcatcacgcaatgtatgctgattcgcgcgggaaatatgggtattatacgcaactcaattacccacacatgtctaaacggaatcttcgatgctaaaaatcttcaatactctgacacgccaaaaagaggaatttaagcctattcacgccggggaagtcggcatgtacgtgtgtggaatcaccgtttacgatctctgtcatatcggtcacgggcgtacctttgttgcttttgacgtggttgcgcgctatctgcgtttcctcggctataaactgaagtatgtgcgcaacattaccgatatcgacgacaaaatcatcaaacgcgccaatgaaaatggcgaaagctttgtggcgatggtggatcgcatgatcgccgaaatgcacaaagattttgatgctttgaacattctgcgcccggatatggagccgcgcgcgacgcaccatatcgcagaaattattgaactcactgaacaactgatcgccaaaggtcacgcttatgtggcggacaacggcgacgtgatgttcgacgtcccgaccgatccaacttatggcgtgctgagccgtcaggatctcgaccagctgcaggcaggcgcgcgcgttgacgtggtcgacgacaaacgcaacccaatggacttcgttctgtggaagatgagcaaagagggcgaaccgagctggccgtctccgtggggcgcgggtcgtcctggctggcacattgaatgtagcgcaatgaactgcaagcagctgggtaaccactttgatatccacggcggcggtagtgacctgatgttcccgcaccacgaaaacgaaatcgcgcagtccacctgtgcccatgatggtcagtatgtgaactactggatgcacagcgggatggtgatggttgaccgcgagaagatgtccaaaagcctgggtaacttctttaccgtgcgcgatgtgctgaaatactacgacgcggaaaccgtgcgttacttcctgatgagcggccactatcgcagccagttgaactacagcgaagagaacctgaagcaggcgcgtgcggcgctggagcgtctctacactgcgctgcgcggcacagataaaaccgttgcgcctgccggtggcgaagcgtttgaagcgcgctttattgaagcgatggacgacgatttcaacaccccggaagcctattccgtactgtttgatatggcgcgtgaagtaaaccgtctgaaagcagaagatatggcagcggcgaatgcaatggcatctcacctgcgtaaactttccgctgtattgggcctgctggagcaagaaccggaagcgttcctgcaaagcggcgcgcaggcagacgacagcgaagtggctgagattgaagcgttaattcaacagcgtctggatgcccgtaaagcgaaagactgggcggcggcggatgcggcgcgtgatcgtcttaacgagatggggatcgtgctggaagatggcccgcaagggaccacctggcgtcgtaagtaattgcgctattgccggatgcgagttttcgcatccggttatcgtctgcgccaccacaacattcccatcagtagcatccccggcaaccacacccacatcaattcagaaataatcacctgatgcccgtacggcgtggtgtaacgagacaatgcaaacggcgcgacttttatcacctgccagggagcgaaaaagcgttcatcactccacggccacagccagccaacgcctttaccgccagtggttacgctatccagcaagctgtggcttagcaagctgacggttaaaaacagccagcagcgaatcagcccagccctgaaccatcggcgtccaataaacacacataacagcgggacaacaaacgcaaacaccaggctatgggtaaacccgcgatgaccaaaaacattgccgtaagcaacgccaaatttaaagctcaatacgtcggcgtcgggcagcatcgccaggatgattccggcaaataacagacgcggagggatgactttgctacccaaccctaaaccaatgcataggggaacggcggcgtgcgtaataacggttggcatgatggtcgcttcggcaaaatgtcgatgctatcagcatggatgaacggggcgtagagggcaaaagtctgaaaagagaaccggcctgttgatacaggccgggaaagggatcaggcaacaacctgtacgctgtgacctgcaaaactcactgtctgaccggcgacgattttgcagcgtttgcgcgtttcaaccgcaccgtcgactttcacctggccttcggcaatcgcgattttcgcctgcgcgccgctttcgctccagccttccagtttcagcaagtcgcacagctcaacgtgcggatgtttacctaaagaaaatgtcgccatgttactcatcctgtggatcatgatattcaacgcacgcctgtagcgtgttttcaatcagcgtggcaaccgtcatcgggccaacgccgccgggaacaggcgtaatgtaactggcgcgtttagccgcgtcttcaaacacgacgtcgcccacaactttgccattttccagacggttgatgccgacatcaatcacaattgcgccttctttgatccagtcaccgggaataaagcctggcttgccaacggcaacgatcaatagatcggcattttctacgtgatgacgcagatttttagtgaagcggtgagtcactgtagtggtgcaacctgccagcagcagttccatgctcatcgggcggccaacgatattgcttgcgccaatcaccacggcgttgaggccgaaggtatcaatgttgtaacgctcaagcagcgtgacgataccgcgcggggtgcagggacgcagacgcggcgcgcgctggcacagacgaccgacgttgtaaggatggaaaccgtccacgtctttgtccggatgaatacgttccagcactttgacgttatcaatacccgccggtaacggcagttgaaccagaatgccatcgatggtgttgtcggcattcagcgtatcgataagctccagcagctccgcttcgctggtggtttccgggaggtcataagagcgggagacgaacccgacttcttcacaagccttgcgtttgcttgcgacataaatttggcttgcagggttactacccaccagcacaacggccagtcctggtgcccgcagtccggctgcaatacgcgcctgaactttttgagcaacttcagagcgcacctgctgcgcaatcgttttaccgtcaataatctttgctgccatcagagagaggattccatctgttacgtagatcgaaggggatgcgcctattttgtcagaagcggggcgcgctgtcaggtttcgtttcagatttatcgcgtgaagcgacctcttgcgaaggtgaggcgcaccgtcgctgagactgaaagcttcatttttcgtccatgatggcgttgtaaatctggaactgatttatttccttgtctaaggattaagataatttaagaaatacctgacaatataaaaagaattttcagcctggtaatttaccgcttcaggtctatatttgtgttgaatatattttgcgcggaagtattcatctaacggggctctctattttttagaatagagtgcatattttcaattaagacattcttagaggataaaaaggaatttactactatcagtgtcttaaataaagtaatcggttatatacggatgtggagtcgataaatgagattgaaggaatatatatgaaattaagatttattagctctgcgctggctgccgcactattcgccgctacgggtagttatgctgccgttgtagatggcggtacaattcactttgaaggcgaactggtgaatgctgcctgtagtgtgaatactgacagcgcagaccaggttgtcacactcggtcaatatcgtaccgatattttcaatgctgttggtaatacctctgcattaattccattcaccattcagttgaacgactgcgatcctgttgttgccgctaatgctgccgttgcattttctggtcaggctgatgcaatcaatgataatttattggccattgcatccagtaccaatacaacaacagcaacgggtgtcggtattgaaatacttgataatacatccgcaattctcaaacctgatgggaatagcttcagtaccaaccagaacttgatccccgggaccaacgttcttcatttttctgcacgttataaaggcaccggtacaagtgcaagtgcagggcaagcaaatgctgacgcgacttttattatgagatatgaataatcaaaaccacgttgttttgaattatatatcacgtcttataacaaagtaatgtaccggttgtctgaagcggtatggtggcaatgtaaatcgaaatcatgttcactttgtatcatgccgctttattaaatgaaaagggaatgatgtgttgtaagaaaccaaagcaatcatttctttatattccttatttttgccgtcaggaatacacaaggcgtattaactatgatgactaaaataaagttattgatgctcattatattttatttaatcattagcgccagcgcccatgctgccggagggatcgcattaggtgccacgcgtattatttatcccgctgatgctaaacagactgcggtatggattagaaatagccataccaatgagcgctttctggtcaatagctggattgaaaacagcagcggtgtaaaagaaaagagtttcatcattacaccgccactgtttgttagtgaacccaaaagcgaaaatactttgcgtattatttacaccggtccaccgctggcagcagatcgtgagtctctgttctggatgaatgttaagacgatccctagcgtagataaaaatgcattgaacggcaggaatgttttgcaactggcgattttaagccgcatgaaattatttctccgtccaattcaattacaagaattacccgcagaagcgccggacacactcaagtttagccgatccggtaactatatcaatgttcataatccaagtcctttttatgtcaccctggttaacttacaagtgggcagccaaaagttggggaatgctatggctgcacccagagttaatagtcaaattcccttacccagtggagtgcagggaaagctgaaatttcagaccgttaatgattatggtagtgtaactccggtcagagaagtgaacttaaactaaccgaatcatctgacaatatcagagctaattatgaaaatacccactactacggatattccgcagaggtatacctggtgtctggccggaatttgttatagttctcttgccattttaccctcctttttaagctatgcggaaagttatttcaacccggcatttttattagagaatggcacatccgttgctgatttaagccgctttgagagaggtaatcatcaacctgcgggcgtgtatcgggtggatctctggcgtaatgatgagttcattggtagccaggatatcgtatttgaaagcacaacagaaaatacaggtgataaaagtggtgggttaatgccctgttttaaccaggtacttcttgaacgaattggccttaatagcagtgcatttcccgagttagcccagcagcaaaacaataaatgcatcaatttactgaaagctgtacctgatgccacaattaactttgattttgcagcgatgcgcctgaacatcactattcctcagatagcgttgttgagtagcgctcacggttacattccgcctgaagagtgggatgaaggtattcctgctttactcctgaattataatttcaccggtaacagaggtaatggtaacgatagctattttttagtgagctcagcgggattaatattggcccgtggcgtttacgcaacaatggttcctggaactattttcgcggaaatggatatcatagtgaacagtggaataatattggcacctgggtacagcgcgccattattccgctgaaaagtgaactggtaatgggagacggcaatacaggaagtgatattttcgatggcgttggatttcgtggtgtacggctttattcttctgataatatgtatcctgatagccagcaagggtttgccccaacggtacgtgggattgcccgtacggcggcccagctaacgattcggcaaaatggttttattatctatcaaagctatgtttcccccggcgcttttgaaattacagatttgcacccgacatctagtaatggcgatctggacgtcaccatcgacgagcgcgatggcaatcagcagaattacacaattccgtatagtacagtgccaattttacaacgcgaagggcgtttcaaatttgacctgacggcgggcgattttcgtagcggtaatagtcagcaaagtagccctttcttttttcagggtacggcactcggcggtttaccacaggaatttactgcctacggcgggacgcaattatctgccaattacaccgcctttttattagggctggggcgcaatctcgggaactggggcgcagtgagcctggatgtaacgcatgcgcgcagtcagttagccgacgccagtcgtcatgagggggattctattcgcttcctctatgcgaaaagcatgaacaccttcggcaccaattttcagttaatgggttaccgctatagcacacaaggtttttatacccttgatgatgttgcgtatcgtcgaatggaggggtacgaatatgattacgacggtgagcatcgcgatgaaccgataatcgtgaattaccacaatttacgctttagccgtaaagaccgtttgcagttaaatgttagtcaaagtcttaatgactttggcagcctttatatttctggtacccatcaaaaatactggaatactagcgatagtgatacgtggtatcaggtggggtataccagcagctgggttggcatcagttatagcctcagttttagctggaatgaatctgtagggatccccgataacgaacgtattgtcggacttaatgttagtgtgcctttcaatgttttgaccaaacgtcgctacacccgggaaaatgcgctcgaccgcgcttatgcctcctttaacgccaaccgtaacagcaacgggcaaaatagctggctggcaggtgtaggtgggaccttactggaaggccacaacctgagttatcacgtaagccagggtgataccagcaataatgggtacacgggcagcgccacggcaaactggcaggccgcttacggtacgctggggggcgggtataactacgaccgcgatcaacatgacgttaactggcagctgtctggcggtgtggtcgggcatgaaaatggcataacgctgagccagcctttaggggataccaatgttttgattaaagcgcctggcgcaggcggtgtacgcattgaaaatcaaactggcattttaaccgactggcgcggctatgcggtgatgctgtatgccacggtttatcggtataaccgtatcgcgcttgataccaatacgatggggaattccatcgatgttgaaaaaaatattagcagcgttgtgccgacgcaaggcgcgttggttcgtgccaattttgatacccgcataggcgtgcgggcgctcattaccgttacccagggcggaaaaccggtgccgtttggaagtctggtacgggaaaacagtaccggaataaccagtatggtgggtgatgacgggcaagtttatttaagtggtgcgccattgtctggtgaattactggttcagtggggagacggcgcgaacagtcgctgcattgcgcactatgtattgccgaagcaaagcttacagcaagccgtcactgttattagcgcagtttgcacacatcctggcagttaaaggaaattatcaataagataatctgcagattattattggcgatggcatgtttgtgtctggcaaacatatcctgggctactgtttgtgcaaatagtactggcgtagcagaagatgaacactatgatctcagtaatatctttaatagcaccaataaccagccagggcagattgttgttttaccggaaaaatccggctgggtaggtgtcagtgcaatttgtccacccggtacgctggtgaattatacataccgtagttatgtcaccaactttattgttcaggaaactatcgataattataaatatatgcaattacatgattatctattaggtgcgatgagtctggttgatagtgtgatggatattcagttccccccgcaaaattatattcggatgggaacagatcctaacgttagccaaaaccttccattcggggtgatggattctcgtttaatatttcgtttaaaggttattcgtccctttattaacatggtggagatccccagacaggtgatgtttaccgtgtatgtgacaagtacgccttacgatccgttggttacacctgtttataccattagttttggtggccgggttgaagtaccgcaaaactgcgaattaaatgccgggcagattgttgaatttgattttggtgatatcggcgcaagcttatttagtgcggcagggccgggtaatcgacctgctggtgtcatgccgcaaaccaagagcattgcggtcaaatgtacgaatgttgctgcgcaggcttatttaacaatgcgtctggaagccagtgccgtttctggtcaggcgatggtgagcgacaatcaggatttaggttttattgtcgccgatcagaacgatacgccgatcacgcctaacgatctcaatagcgttattcctttccgtctggatgcagctgcggcagccaatgtcacacttcgcgcctggcctatcagtattaccggtcaaaaaccgaccgaagggccgtttagcgcgctggggtatttacgcgtcgattatcaatgaggtacggagaatgagaagagtactctttagctgtttctgcgggctactgtggagttccagtggatgggcagttgaccctttaggaacgattaatatcaatttgcacggtaacgttgttgatttctcctgtaccgtaaacacagcggatattgataagacggtagatttaggcagatggcctacgatacaactactgaacgctggcgataccacggcactcgtcccttttagcctgcggctggagggatgtcctccgggtagtgttgcgattttatttacgggaacgccggcatccgataccaacctgctggctctggatgatcccgcaatggcacaaaccgtcgccatcgaattacgtaatagcgatcgctcccggctcgcactgggggaggcgagcccgactgaggaagtagatgcaaatggcaatgtcacactaaacttttttgccaattatcgagcgttagccagcggtgttcggccaggtgtggcgaaagcggatgcgatatttatgatcaattataattaatattatattaattcgtataatttggcgtagtcgataagctctacaatactatgcaaacctagcttgccataaatattagatttatgcgcactaactgttttattgctaagtaataacttatcggcaatttctttattagataatccgctaaccagataacgtaatatggtcacttcacgattagatagcacagtgaccgtactactattcgtactacatttattgctttttatatagttaagcgtttcgctgggaaaaaacgtgtatccggagaggatcatctgaacggcatgaaaaatatcattctgatcattgcatttactgacaaaaccgttagcaccagcttgtatcgctctgccagcataaaagcattcacttttgctacttaaaaataacactttcactgtgctctggatttgtttgatccttttcaggaaggtaaaaccgtctgttccgggcaagtctatatccataatgattaaatcaacaggacgggttcggagataatcgatggttatgcgataatcatccgttttcaggacaatctgcaattcactgtttttttgcaacagaacttcaatagacattctgatgataggatgagtatccataatgatcacgctcgttggtttcatagttaccagtctcataggagcggacaattttccgttaggtcgggaaattgtactttgatacatgaaaatacgggttttcttgattcagacgcgcagcggtgtgcgtttgtttgccgctatagcgaaataaatcagaaaatcagacgcggtcgttcacttgttcagcaaccagatcaaaagccattgactcagcaagggttgaccgtataattcacgcgattacaccgcattgcggtatcaacgcgcccttagctcagttggatagagcaacgaccttctaagtcgtgggccgcaggttcgaatcctgcagggcgcgccattacaattcaatcagttacgccttctttatatcctccataatttcagagtgggacatatttgggacattatcaccaaaaatgtcgtctattttcctcgcatgctctgtcaaatgattaggcgcaaggtgagcatacctacgaaccatttctatggactcccatccgcccatttcctgaagcactgataatgggacgcctgactgaatcagccagcttgcccaggtgtgtctgaggtcatggaaacggaaatcttcctcatttatgcccgtcttatccgtttccgctttgcccttcaccacatcactttttgtcgctgtttggcgagataattcaacggtgtcaggccgtaaaacgccttaaaaacagagataaagtagctcgtgctgctatagccacataattgcgccacctgagtgatatttttgttatccatcaataacatctgtacggcgtaacgcatacgacactctgtgacaatctggctatagctggtattttcgttttttaatttctttttgagcaggctggggcttaaacataggctactggcgacaattcgcagattccagtaatgctgaatatcgctttgaataatgcggcagacgctgtcgcggacgctgctgcgtaagatatacatcagtagggcaataaaccggctttgctcaagaaagttagacaatacggtaaaaagcaatgcgcgcgtcaactccgcttcgcagggtctgctgggttgctgcttgctgtggttggcggctagccggaacacttccggtgtacggctatgacaagcgataaccggggttgccagccggctccagggctttacacaggttaagttcttatttaaaaacaacagataatcgttgatgatgttacggttgatgtgggtgattaatacgtgatttaacgtactgagttcaatgacgttattgttgcacgcgaaggcggccaggtagtttttcggaagggtaaacgtagcatggttattgacgcttacctctacctctttttcggtcaggatcaccacgcaaggttcactgctgctcaattgcatttcgcactcctcagatatcagaaactccgctcaaaggatctatgcttcctgcatgagtgatcggcccgttcgccgataacgatcttctttctttagcacgctttttagcaattaatcttgatggaattctgatgagagcgaaagaggtaagccaggtcgtacccgacttacctggaggagatttaatactcgagaatgccgtgcgcgacgggcaaatagcgcagagagaaatagagagtgtctttaccgcaagaggaacgtttcgctaacaggctggcaatttctgcgtccggtttcggtttcgctgtaaaggttttgcctttgccggcgacaaaaagttcataaacaacgccgctggcaggggcgggactttggcaatcggcgctggcctgtaaataacgttcacgctgttcagcggtcagtttatccacgccgctgccatcctgtacccagacattaacgccggttgctttaacgtgttccagcagttggcgatagccatcggggctcatgtttccggcgaaaaaactactgatataaaccggttttgcactaacatcgctaatcagccgctgcgcgttgtttaaccatgttagcaaaggctgacgggcggcttcgctgcgccagttcaggtcgtcaatttccgcgctgatgtaccagccatccggcgttatgccaggcgcggcgctccataatctggcttgctggagatcggcagccagcaggcgattaagatagctttccagcgctgcggagctctgtttctggtgcataaaaaattccggatcggcgttcagcccgacaataagcttcagaccagcctgttgcgcagctgcggcccgcttaaacaataacgtgcgctgttctggctgggtaaatgcatcgccgtaacgggtccattgcaaaacaagggtatcgaagccttgcaaacgtaactgactcatcagcccctgccactgggtatcggtaacctgactatctcggttttgtggttgccagataatacctttcatcgcaaaggaaaaagggctgaccaaaagcagtgtcagcaatacgaaaatgaacttacgcatttaccagtgcactccaatggtgagaaacgcgttgttgcgctctccgttacgttgattaatcgccttaaaggtatgttgatactcgacgccgagactgactttgtgcggccaggcgtcgtagtgcgtctcgccggtccagatattccagcggaccccgactccgccaagctgcgcgccctgagtgcctttatcacgatagccgttgtcctgaacgtgagcgtaaggctcaatagtctgtccgttagctaccttctgatgccagctgacgcgataatctgccgtccacgcctgaatatcctggcggatatattgcgccgcatcgaggtacaggttttgggcaaaccagccactaccgttcgggtgccattcgtcgctgtatttgccgccattaaagaaactggcgctggcgcgcagcatggtatcggatgcgccattttggccgttcagcggcaactgctgttcgacggcgatgaaaaagatctgatcgcgcagcggcttccagcgcagaccggtgccggacatcggatttttcaccggcatcatcaccccgttttctccggtatcggcaaagacgcggctataaacactgagcaggtcgccttccagcagcatattgcgtccgatgcggtactcggcttccagttgtccgtagctacgatagcttttccctggcgctgcgccgccgacattattgttagcggtactcattgcgccggaacgcaagccgatggaagaatcgaaactgaacgtccagcggcgaccgacctcctcatgcaaacggcggaaattgaagcgttgttgattttgttctggggtcagtggggttatcagcgcctgattatcaatgtcatcaatcaccagccgggcgtagtgctgcgtcgcaggcatgtcatccagacgctggttcacgtaggccagttgtcggatcagtgccggatcgtccggaagccctttatgcgccggttcgagcatttcccggctctgtgcgatatcaccgctatcccacaaggcgtaaccaagcgctgcctgggtgttgctattattcggttccagttccagcgcggcgcgcaaatcactcaccgcggccgggacattatgacgttggcgataaattgtcgcccgcgcaacgtaagcgttggcagaaggcgcaatattgatactgcgcgtgagatcgttcagtgcgagttccggctgaccaggaatgtaacgttgcgcatgcagccaccagtagagggcattgcttcccagtccacgtttttctgcctgttgtagccagcgatcgcgagccgcaccatttcctgccgcctgggcggtattggcagcagcaagcagatcctcattgctcatgtcgtgaagactgattttctgccaggccgccagtgcggtggcgtagtcctcaacctgatacgcctgataggctaccgcacgatgttgccaggcgctcggttgtcgttgttcggcctgaagccatgcatacaacgccacaccgggtagcgtgtcccgataacactttgccagacggttccaggcggcggcatcgtaggaagggctcatatcgcccagcaagcgaactattgccgggcaattatctgcaatacccggcaactgactttgccactgacgttgctccgccagcggtaagggtttgcttaaaatcgccaccttcgccggcgttgccaggtaaggatgactttccagcagagacgccagtcgcgccattaaagtctggctgacacgcgcatcgccctggaaaggatagcgttgcagcaataaatcggcagcttcgcgactctgctcgttctgcatcagttgccaggttagttgatccaggcgggtaagatttgccggttcttgctgatacagcaatcgtgccagacgcagagcttcagccttgttacgggtcgccacgctgacagcataacgctcctcaagcatttcattggcggggagggtggcgagcagtttttgcgctgcgtcgtactgaccttcttttaacagcaccggtagcgtcgcgccaacaacatactggcggttgtcggcaaactgtaccgtataattcgccaacgcctgaacggggttagcgctgtatttagataacagatagagccaacttttctcttgtgcgtccgtggtaaatagtggcttattttcaatgagataatgctggaggcgtgctttttcgccacgataagccagcgcggtcgcgtaagtaatataactctgaggatcggtgaagatcccctgactttgcagtgccaggatccgatcgtccagctgcccggcaagaagcacgtcaaaccactgacggcgttctgccgcgcttaatgtgttctgctggcgtgcttcattgtatagcgtatctgcctgggaccattgtttcaggtagattgcccgttgcagcagatcggttcgcagcgtttttccttccgggcttgcagcaaacgtcgcatcgttcagttgcgctctggcgacaggtaactgtgccagccgcagggcattctgcccgacttcactgcgacaacgcagggtcggcgcagcatcgcacgctttttgctgggcaagcagttcttcaactgtcgtaacgcttttcacttcaaccggaatagccgccagactgcgctcaagtcgggcatctcctgggtgacgtttcagttgatcctcaagcaacagccgcgcccggtcatcatgaccaaaatggcgataggcttccgcaaggtataaagtcagcggaatattatccggcacctgctggtgtatatattcaaattcgcggatggcggttgcttcgtcgttatttttctgtgccttcagcgctttatcgagacggggataaataacaaaatggcgataatcgctcagccccagctcttctgcgctggtgccgatattgtctgcgagtgcgctggtactcaataaagacgtcagcagtaaaccagaccatccgatgacgcgattaaggttattctccttcattttcggactccagttgcgcaacctgttctgtgtttaaacctgctttgagtaatagactttgcatgctaacttgtaattcgcgttgaattgtcaggacgcgatccaacgtttcctggctgataacgccttcggtgaccaaaaacttgccgagcggcagagaactgcgttcatggcgcaataacaacacgttaattgcactacgattaatatgaccgagcgtggtcagtatttcggcgaacaggaactgatgcggcacatattgccgccagatttcaccggcctgctgttccgtgagccactgatgctgaaccgcattgtacaacattgcccgcggatcgtgaccgcgtcggcgtgcataccagtgacgtaaccctgtgacaatttgtccccgcagaacaatgacgtaacgcactttgcgtccgactttacgcgtcagggccgccaggctaaccgggtcaataccatcttcactgccgacaattaactcgtcattttccagacgcagcggcagtaccgcataatgcagcgccacggaggccggcatttcggcaatcaggctggaagggatctgccaggcatcgatggattcccacgccacgccgttttgctctgccagcgcctgtgccagctgctcggcgctaatcagcccctgcatcagcatactaccgcccaggcgtagaccttcgacgcgattacgcagtgctgtatcgagttgttcttcagtgatgacctgattttccagcagaatttgacctaacgggcgcaagctgcgggtatcgccagtcacgctggggaagtcatgcgttgttttatcccacgccacgcgacgtggatcgccgtgttgaagtacctgttttagcgcgcgccagttggccatgaagttaatcaggttgccccagaaaagacgcaggacggaaagcagcccctgcgtcaggccgtagtagccagtaacgaaaatcacccgctgcacgatgcggttaaccatcaaaccaaagtttagccacagcagggtcattaaccatgcgctgccgctgaaaatagaaaggaaatgccaggcatcgggccacaaactttcatacgccagcaacagcaaaagctggatcatcaccagcatcgcgaggaagctgacaaagttactgattgcccctttgcggtcgcgccagagaaagtagttcagcgtcaggctggaggtccatttatgggttttaaagccttggaaaacaatgccgatgatccagcgggatttttgtcgaaccgcagtgctaaaggtatcggggaaatattcgcgcacgcagatcatgttacttgtccgcgcgtgctgtaaaaatttacgctgctcgcgttctttggcttcgtccaccaccggaaaacggacaaaaatttccgtcatacctttttctttcaggcggaagccaatgtcgtaatcttcagtaagactctgcacgtcgaaagcaataccgtcaccgtcagctaacagtgcggtcacggcgcggcggctgaaacaggtgccgacgcctgcgctgggcacttgtccggcgagggcttcacgcaccggaacatctttgccatgcagctcactaaactcatcaatgtaagtcatgctggtgaagtgcgtccattcgcgttcgaacggatacaccgggatctgaatcagatctttacgctcgaccagatagttgaacagacgcaattccatcggactaatcacatcttcggcgtcatgcagaataaaaccagcaaaagcgaaattggcgctacgctcaaattgggtgatggcgtccagcacgttgttcagacagtcggctttgctggtggggccaggacgcgcgcagactaccttatgcacattcgggaagcgagcgcacacttcgtcaacatcacgctgagtatcggggtcgttggggtaggtgccaacaaagatatgatagttttcgtagtcgagcgtggtcgccgccagctcggccatattgccgatgacgcccgtttcattccacgccggaaccataatcgctaacggtttttcatctggtttatacagttcgcggtaactcattcgcgggtagcggcgataaacactcaacttgcgtttaatgcggcgtacccagtagacgacatcaataaaaaaatcgtccagcccgctgatgaacatgatgaccgctaacgttatcgcgattacttttaagccgtagagccaggtagcaaaaacatcaagaagccagtccacacaaaaaccttacattaacgctggttatgtttagggtggcgtatattaaggttttttatgaattgtgacagctttttaccattaataggtatgactattgcggcacgttatttttacactggttataaaagttgccgtttgctgaaggattaagcgggtaatgtgataacaaaccttgtcccccgcgcatcgctcgttaccgcaaccgtgcctttatgcgcgacaacaatgcttttcactatcgccaggccaataccgctaccttcaccttttcgctggcgggaggggtcaacgcgatagaaacggtcaaacaatcgcggtaagtgctcgggcgcaatgggcgtaccggggttttcgacgataacttgcaccaggtgatcgaccgtctgacagcgcactacaattgtctctccggttggcgtataacgcagggcgttgctaagcaggttgcttagcgcccgacgcagcatcagcggatcgcccgcgacctgacacttgtcgccaacaaaccgcaactccacgccgcgatcttccgctaacgcctcgaaaaaatcgaacactttgccgacttcatccgccaggttgagcattttcttttcggggattagctggttgttatcggcctgagcgagaaacagcatatcgctgaccattttcgccattcgcgtcagctcttcgagattagagtagagcacatcttccagctccttctggctgcggctctggctgagggcgatttcggtttgcgttatgagattcgtaattggtgtgcgaatttcgtgagcgatatccgcactgaaattggactggcgggtaaagacatcctcaatacgctcgatcatatggttgaagctcagtaccagctgttccagctcaatgggcacggtctgcgggtcgaggcgaacgtcgagatctttgctggtaatattctggatttgacggctgacgctgcggatcggcgcgtgacctttatgtaccgccaacagtacgataaagacgatcaggatgctgattacgcttgcggtcataataagtttattcatcaaatcatttatgtaatgaagatgaaaatcgatgctaagcgcgatgtagagcgtataaatcggtttgccgtccaccaacgggccaaccggcaagttaatcatccgccagttgctgtgttccatatgcccgtgaccgtggcctggcatcatcatcgtcgggccggaaaggagatacacctcgccaccctgagcgtctttatcgggtatggcgtcacgcgtaaactcgcggatatccggcgcaccgggggagtgatacaccgttttaccctgactatctgccagggaaatcaacacattggaataaccactgacgatatcttccagcgtcattaagcgtcgggcttgcgtttcgtcagggtgatttagtacccgttcaagggtggcgctaatctcttttaaatcattaatatcctgctcggcaaaatgaacttttacactgtggatcatgatccatgcaaaggcgaaaaacgccgcgatggtggccaggctgataaaaaaggtcaggcgggttgccaggctaaacgggcgctgaaatggcttactgaccatccggcacctcaagcatgtaacccacgccgcgcacggtctgaattagcttcggctcaaagtcgttgtcgattttgccgcgcagccgcttcaccgccacatcaatagcattggtatcgctgtcaaaattcatgtcccatacctggctggcgataaggctgcggggcagcacttcgccctgatggcgaaggaagaactccagcagagtaaactctttactggtcaaagtgatgcgcgtgccgctgcgggtgactttgcggctgacgagatcgaccatcaaatcggcaacctgaaactgactttcgataatcaccgccgccccgcgccgcagtaatgtgcgcacccgcgccagcagttcagcaaaagcgaatggcttcaccaggtagtcatctgcccccaactccagccccttgacgcgatgttcaatggtgccaagcgcggtaagcaacagaatcggcatccctttattggcggagcgtaacatgcgcacgatatcccagccgttcacgtccggcagcataatatcgaggattatcagatcataatcaccggtcatcgccagatggtagccattcagcccgttgtcggccaaatcgaccacaaaaccggcttcggttaaccctttggtcaagtattctccggttttcttttcatcttcgacaatcaacagtttcatatttcctccgcatgttgcccgggcaattctagagtagcgggatcagatggcaatcgcttattggcaaaatgacaattttgtcatttttctgtcaccggaaaatcagagcctggcgagtaaagttggcggcataaaatcaccagaaattatgagcctatgtctccttgtaaacttctgccattttgtgtggcccttgcgctaaccggttgtagtctggcaccggattatcagcgtccggcaatgcccgtgccgcagcagttcagtctcagccagaacggcctggttaacgcagcagataactatcagaacgcgggctggcgcaccttttttgttgataatcaggtgaagacgctgattagcgaggcgctggtgaataatcgggatttgcgcatggcgacgctgaaagtgcaggaggcacgggcgcaatatcgtctgaccgatgccgaccgctacccacagctcaatggcgagggcagcggcagctggagcggtaatcttaaagggaataccgccacgacacgggagtttagcaccggccttaacgccagctttgacctcgattttttcggtcgcttaaagaacatgagcgaagccgagcgacaaaattatttagccactgaggaagctcagcgcgcggtgcatattctgctggtttctaatgtcgcgcaaagctatttcaatcagcaactggcgtatgcgcaattgcaaatagccgaagaaacgctgcgtaattatcagcagagttatgcgtttgtcgaaaaacaactgttgacaggtagcagtaatgttctggcgctggaacaggctcgcggggtgatagaaagtacccgcagcgacatcgctaaacgtcagggggaactggcgcaggcgaataatgcattgcaactgttgctgggaagctacggcaagctgccgcaagcgcagacagtaaacagcgacagcctgcaaagcgttaaattaccggcgggattgagcagccaaatcttattgcagcgcccggatattatggaagctgaacacgcgttaatggcggctaatgccaatattggcgctgcacgcgcggcattttttccgtctataagcctgaccagcggaataagcaccgccagtagcgatctaagcagtttatttaacgccagcagcgggatgtggaattttatacccaaaattgagatccccatttttaatgccggacgcaaccaggccaatctggatatcgccgaaattcgccagcagcagagcgtggtgaattatgaacagaaaatccagaacgcctttaaagaagtggcagatgcgctggcattacgtcaaagcctgaacgatcaaattagcgcccagcagcgttatctggcaagcctgcaaattactttgcaacgggcgcgggcattatatcagcacggcgcagtaagttatctggaagtgctggatgccgagcgttctttatttgcaacccgacaaactttacttgatctgaattatgcccgtcaggttaacgaaatttctttgtataccgcacttggtggcggttgacagcaatatactcgtcatacttcaagttgcatgtgctgcgtctgcgttcgctcaccccagtcacttacttatgtaagctcctggggattcactcgcttgtcgccttcctgcaactcgaattatttagagtatgacttttaactccaggagagaataaatgaaaaaagcactgcaagtcgcaatgttcagtctgtttaccgttattggctttaatgcccaggctaacgaacatcatcatgaaaccatgagcgaagcacaaccacaggttattagcgccactggcgtggtaaagggtatcgatctggaaagcaaaaaaatcaccatccatcacgatccgattgctgccgtgaactggccggagatgaccatgcgctttaccatcaccccgcagacgaaaatgagtgaaattaaaaccggcgacaaagtggcgtttaattttgtccagcagggcaacctttctttattacaggatattaaagtcagccagtaacccaggtttaatgagatgaaaaaaatcgcgcttattatcggcagcatgatcgcgggcggtattatttctgcggcaggttttacctgggttgcaaaggcggaaccgcctgcagaaaaaacgagcaccgcagaacgtaaaatcttattctggtacgacccaatgtatcccaatacgcggttcgataaaccaggtaaaagcccgtttatggatatggatctggtgccgaaatatgccgatgaagagagttctgcgtctggtgtgcgcattgacccgactcagacgcagaatctgggggtgaaaacggctaccgtcacgcgcggaccgctgacttttgcccagagtttcccggcgaatgtcagttacaacgagtatcagtatgccattgtgcaggctcgcgctgccgggtttatcgacaaggtgtatccgcttaccgtgggcgataaagtacaaaagggcacaccgcttctcgacctgaccattcctgactgggtggaagcgcagagtgagtatttactgctgcgcgaaaccggcggtacggcgacccagactgaaggcattcttgagcggctgcgactggcgggaatgccggaggcggatattcgccgcctgatcgccacgcaaaaaatccagactcgctttacgctcaaagcgcccattgatggcgtgatcaccgcgtttgatctgcgcgcgggaatgaatatcgccaaagataacgtggtagcgaaaattcagggtatggacccggtgtgggtcactgctgcgatcccggagtctatcgcctggctggtgaaagatgccagccagtttaccctcaccgttccggcgcgaccggataaaacactcaccatccgcaaatggacgctgctacctggcgtggatgccgcgacccgcacgctgcagctgcgtctggaagtcgacaacgccgacgaggcgctaaaaccgggcatgaacgcctggttgcaactcaacaccgccagcgaaccgatgctgctcattccgagtcaagcgctgattgataccggcagcgaacagcgggtgattaccgttgatgccgacgggcgctttgtaccgaaacgcgttgctgttttccaggcaagccaaggcgtcaccgcattacgctctggtctggcggaaggtgaaaaggtggtttccagcggcctgttcctgattgattccgaagccaatatttctggcgcactggagcggatgcgctctgaaagtgcgacccatgcgcattgagggaataaccaatgattgaatggattattcgtcgcagcgtggcgaaccgttttttggtgctgatgggcgcgttgtttctgagcatctggggcacctggaccatcattaatacgccagtggatgcgctgccggatctctccgatgtgcaggttattattaaaaccagctatcccggtcaggcaccacaaatcgttgaaaatcaggtgacttatccgctaaccaccaccatgttgagcgtgcctggcgcgaagactgtgcgcggtttcagtcagtttggcgactcttatgtgtatgtcattttcgaagatggcaccgatccgtactgggcgcgtagccgggtgctggagtacctcaaccaggtacagggtaagctgcctgcgggagtcagcgccgagctggggccagatgccacgggtgttggctggatctatgaatatgcactggtggatcgcagcggtaagcacgatctggccgatttacgcagtttacaggactggtttctcaaatatgagctgaaaaccatccctgacgttgcggaagtggcgagcgtgggcggtgtggtgaaagagtatcaggtggttatcgatccccagcgcctggcgcagtatggcatcagtctcgccgaagtaaaaagcgcgctggatgctagtaaccaggaagcgggcggtagcagcatcgaactggcggaagcggaatatatggtgcgcgccagcggctatctgcaaacgctcgacgactttaatcacatcgctttaaaagccagtgaaaatggcgtgcccgtttatctgcgcgatgttgcgaaggtccagattggcccggagatgcgccggggcattgccgaactaaacggcgaaggcgaagtggcgggcggggtggtgatcctgcgatccggcaaaaacgcccgagaagtgatcgccgccgtgaaggacaaactggaaacgctgaaaagtagtctgccggaaggcgtggagatagttacaacatacgatcgcagccagctcattgaccgcgccatcgacaacctcagcggcaagttgctggaagagtttattgtggtggcggtagtctgtgcgctgtttctctggcatgtgcgcagcgcgctggtggcgattattagcttgccgctggggttgtgtattgcttttattgtcatgcacttccagggactgaatgccaatattatgagcttgggtggcattgcgattgccgtcggggcgatggtcgatgctgctatcgtcatgatcgagaatgcgcataaacggctggaagagtggcagcaccagcatcctgacgccacgctggataataaaacgcgctggcaggtgatcaccgatgcgtctgttgaagtggggccggcgctatttatcagtctgctgattatcacgttgagctttatcccgatcttcaccctggaagggcaggaagggcgtctgtttggcccgttggcgttcaccaaaacgtatgcgatggcgggtgcggcgctgctggcgatcgtagtgatcccgatcctgatgggctactggatccgtggcaaaattccgccggaaagcagtaacccgctcaatcgctttttgattcgtgtttatcatccgctgtcgctgaaagtactgcactggccgaaaaccacgctgctggtggcggcgcttagcgtgctgacggttctctggccgctcaataaagttggcggggaatttttaccgcagatcaatgaaggcgacttgttgtatatgccaagcacgctgccggggatttccgcagcagaggcggcgagtatgctgcaaaaaaccgacaagctaattatgagcgtacctgaagtggcgcgggtatttggcaaaaccgggaaagcggaaaccgccaccgattctgctccgctggagatggtagaaacgaccatccagcttaagccgcaggagcagtggcggccaggcatgacgatggacaaaatcattgaggaactggataacaccgtgcggctgccggggctggcgaatctgtgggtgccgccaattcgtaaccgtatcgatatgctcagtaccggcattaaaagccccatcggcattaaagtttccggcactgtgctggcggatatcgacgcgatggctgagcaaattgaagaagtagcgcgaacggtgccaggcgtagcttctgcgcttgccgagcggctggaaggtgggcgctatatcaacgttgagattaaccgtgaaaaagccgcacgttacggtatgacggtggcggatgtgcagttgtttgtgacttctgcggtgggcggggcgatggttggcgaaacggtggaagggattgcccgttatccaattaatctgcgttatccgcaaagctggcgcgatagtccgcaggcactgcgccagctgccgatcctgacgccgatgaagcagcaaatcaccctggcagacgtggccgacattaaagtctctaccggaccgagcatgctgaaaaccgagaatgcgcgcccgacgagctggatttatatcgatgcccgcgatcgtgacatggtgagcgtggttcacgatttgcaaaaagcgatagctgaaaaagtgcagttaaaaccgggcaccagcgtggcattctccgggcagttcgagctactggagcgcgccaaccataagcttaaactcatggtgccgatgacgttgatgattatcttcgtgctgttgtatctggcgttccgtcgggtgggcgaagcgttgctgattatcagcagcgtaccgtttgcgctggtgggcggcatctggttgctgtggtggatgggctttcatctttccgtggcgacgggcactggctttatcgccctcgccggggtcgccgccgaatttggcgtggtgatgctgatgtatttacgtcacgccatagaggccgtgccgagcttgaataatccacaaacattcagcgagcagaagctggatgaggcgttatatcacggcgcggtcctgcgcgtgcgcccgaaagcgatgacggtggcggtgattatcgccggtctgctgccgattctgtggggaacgggggctggtagtgaggtgatgagccggattgccgcgccgatgattggcggcatgatcaccgcacctttgctgagcctgtttattatcccggcggcgtataagctgatgtggctgcaccgacatcgggtacggaaataaaagcaggataccccgtttaaccgtgtggattgtgtcttgcgacgatgggcactaaatgttaaaaggtgcccctcaacaaaaaagacacacaggggaaaggcgtgaaaaacgcgagtaccgtaagcgaagatactgcgagcaatcaagagccgacgcttcatcgcggattacataaccgtcatattcaactgattgcgttgggtggcgcaattggtactggtctgtttcttggcattggcccggcgattcagatggcgggtccggctgtattgctgggctacggcgtcgccgggatcatcgctttcctgattatgcgccagcttggcgaaatggtggttgaggagccggtatccggtagttttgcccactttgcctataaatactggggaccgtttgcgggcttcctctctggctggaactactgggtaatgttcgtgctggtgggaatggcagagctgaccgctgcgggcatctatatgcagtactggttcccggatgttccaacgtggatttgggctgccgccttctttattatcatcaacgccgttaacctggtgaacgtgcgcttatatggcgaaaccgagttctggtttgcgttgattaaagtgctggcaatcatcggtatgatcggctttggcctgtggctgctgttttctggtcacggcggcgagaaagccagtatcgacaacctctggcgctacggtggtttcttcgccaccggctggaatgggctgattttgagcctggcggtaattatgttctccttcggcggtctggagctgattgggattactgccgctgaagcgcgcgatccggaaaaaagcattccaaaagcggtaaatcaggtggtgtatcgcatcctgctgttttacatcggtagtctggtggttttactggcgctctatccgtgggtggaagtgaaatccaacagtagcccgtttgtgatgattttccataatctcgacagcaacgtggtagcttctgcgctgaacttcgtcattctggtagcaagcctgagtgtgtataacagcggggtttactctaacagccgcatgctgtttggcctttctgtgcagggtaatgcgccgaagtttttgactcgcgtcagccgtcgcggtgtgccgattaacagcctgatgctttccggagcgatcactagcctggtggtgttaatcaactatctgctgccgcaaaaagcgtttggtctgctgatggcgctggtggtagcaacgctgctgttgaactggattatgatctgtctggcgcatctgcgttttcgtgcagcgatgcgacgtcaggggcgtgaaacacagtttaaggcgctgctctatccgttcggcaactatctctgcattgccttcctcggcatgattttgctgctgatgtgcacgatggatgatatgcgcttgagtgcgatcctgctgccggtgtggattgtattcctgtttatggcatttaaaacgctgcgtcggaaataaggcattcacgctacatccgacaaaacgatgtcaaccatccgaaaccgctctcatccattcgatgagagcggtttttttaattactgcttaaatgcacccgccagagagcgaatatcattgccggttggcgagtaatccccgcatatccggttgtcaggtcaggatggtaaggcacctgctttacactttcgcccgtggtcagtgatggctgcgggcgaatcgtaccagatgttgtcaattaatcgtgttggcacagcgttatgactatcttttcttttatctgccagtgcacagcaaacatctcattctcacgatgaatgatgacctgctgtttattccagctaattatctgatagtccagaaaacctgcatcagtttggatctcacttgccttaaatgcgctctctttggcggaaaatgccagtgtcagcgccagagaaaaggctaaaccgcagtctgcgagtcgctcgtgttccgctggtgtaataatgttgtctgtcaattctcttgcggtttgtacagaaaaaatttcttctatatcaatgccaatcggttgacgagataccacggctaatgccgtagtcccacagtggctaatactgccgtatacctccgcaggccagacaggttggcgtagctcgccgattgcgggcacacatttatagccatattcccgcaaagcataaacagcagcgatccgtccggctaaatgctctgttttacgtttacgtccagcgtgttgcagttgtgcgtagtgcggcagccagagtaaatcctgttcacaaaaattcgccggatcgaactcaacaaaatgcagcgtatgtccggcaaaggggagggaggtatgcgtagttttcatatcgaccatattcgagactgatgacaaacgcaaaactgcctgatgcgctacgcttatcaggcctacatggtcctgcaatatattgaattggcaagatttttgtaggccggataaggcgttcacgccgcatccggcatgaacgacgcgcactttgtcaacaatctgacgttagcatcagaagtgggtgtttacgctcatataccacgtacgtcccggctcgttataggtatacgccccggcaccggcgatatagttggcccctgccgaatcgcccgtggtctgggcattacccgcacgccacaaacgtttgtcgaacagattgtccacgccgccggtcagactgacattcttcgtcacatcccaggtcgcgctcaggccaacaatgctgtaaggactaatttctttggtttccggtccaaccgctggctgacctttatagttgtacttcttcggctgctgcttgccgtaccaggtgaaggtcgtttgcatgctcaaatcttcccgtgcctgccagctcagcgtactgttcaacgtatactccgggatgatgctcaaacggtcgcccgtggttttgttttcactcttcagcatataagtgatgttattggtccacatcaccgtttcgctaaccggtacgtttaagcttccttccagaccttcaaccaccgctttcggcacgttatcccactgatagagatcggtgccgactgcgttttgccctacagccacatagcccgcttcaatcttattgcgataatcgttacggaaccaggtgacgcccgccagccacccgtcgcgtttgaactccagaccaatctctttgttgatgctggtttctgctttcaggtcatcgttaccttgcagatagcagccgcccgcgctggcatagcaaccctgacctttactgtagagaatgtagttcgggttagtctggtacaggctcggcgctttataagcacgggcgatgcccattttcagcgtgaagtcatcgcctaaaccttggcttatgttcagcgccgggctccagttattgccgacaatactgtgatgatcgaaacgcagccccggcgttacgatggtgctgtcagtcagctccatgttgttttcggcaaacaggctgaaaatttctgctttactatacgggctacggtcggtggtactcacgccatcaatagcgccaccggtattcgttccggtcagtgcctgggtgttggaacttaagtccttcatccgttgctgattccactccgtacccagcgtcagcgtctggttaacgaggaaatcaatcggcaggttaacttcgctgtgcagcatcacgtcatcaagatcgatatcgacgaaatcctgtgtcgctttttcgttaaatttcccttcggtaccgcccgccagaccttccggaatacggctgttacgggtgtgttcgtactgcacccagttgctggtggtcacgccgttatcccagccaccgttccaggtcagcgcgtagttctggcgatacagacggttggtttcatcgccatatttgctgcgggtataggaatcggagttggtattctgggtgtcgcccgcatacaggttaccctggcggctgtaacctgcttccagttccaggctttgcaatggcgcgaaatcccagcgcaccacgccattaatatctttgttgattaccccttcgcgcccggctggtaacgtcgtggcatacgttccggcacgcgcggactgatggccctggttgatatcccacgcgtcagcctgggttttgtcgaggttgccatacaaacggaagctgaattcgtcgcccagcggaccggtcaggctaaagttagtgcgtttggtggcaccttcctctttatgttctggcgcattgaaatatgcgtcccaggagccgtgccactcgccgctgccttttttggtaatgatgttaaccacgccgcccgccgcgccgttgccataacgcgcagctgccggaccacgcagaacttcaatacgttcaatcatttcaggtggcacccaggaagtatcaccacgggtatcgcgctcgccacgccagccctgacgcacgctgttacggctgcttaccggcttgccgtcaatcaaaatcagcgtgttttccggacccataccgcgaatatcaatctgtcggttattcccacgctgaccactggtggagttaccggtcaggttaacgcctggcatggtacggatgatcttgctcacatcgcgggcaaccgggtttttgcggatttcatctgcggtgatggtgctaacgccaggcgcctgtaagttctgctcggcggcggtaacgacaatagtatcgtcatgactaacaggagtatcggtcggctcttgtgcctgcgctaccccataaatccccagattgaccaacaaggccagggaatgaatcttcttgttcattgttttattcctgcatttttgccacgaattgcaactgtcgggcatggtcgtcatcaacacgacgcatcccgctaccgcgaaaacctttgatcctgaaagacacgcagtgcagttggttaattaatgtccgcgcttcccacggcgcgccattacgctattgcaaatgcaaatagttatcaataatattatcaatatatttctgcaatcaatgaaaaattgcacagtaaacatggggttatggtgtgacggcgttaaaagtaggaagtgagagctggtggcagtcgaaacatggcccggaatggcagcgtctgaatgacgaaatgtttgaggtcactttctggtggcgtgatccccaaggttctgaagaatacagcacgataaagcgcgtatgggtctacatcactggtgtgaccgatcaccatcagaacagccagccccagagcatgcagcgaattgcaggcactaacgtctggcagtggacgacacaactcaatgccaactggcgcggcagctactgctttattcccaccgaacgcgatgacattttttctgtaccatcccccgatcgcctcgaattgcgcgaaggctggcgaaaactattaccccaggcgatagccgatccgctgaacctacaaagctggaaaggcgggcgagggcacgctgtttctgcactcgaaatgccgcaagcgcctctgcaaccgggatgggattgtccgcaagcgccagaaatacctgccaaagaaattatctggaaaagtgaacggttgaaaaagagtcggcgtgtatggatttttaccaccggcgatgcaacagcagaagaacgcccgctggcagttttgctcgatggcgaattttgggcgcaaagtatgcccgtctggccagtgctgactagcctgacccatcgtcagcaacttcctcccgccgtgtatgtgttgatcgacgctatcgacaccacgcaccgcgcccacgaactgccgtgtaatgcggatttctggctcgcagtacagcaagagttattacccctggtgaaagctattgccccttttagcgatcgtgccgatcgcaccgtggttgccgggcagagttttggtgggctttccgcgctgtatgccggactgcactggcctgaacgctttggctgtgtattaagccagagtggaagctactggtggccgcatcggggcgggcagcaagagggcgtgttacttgaaaagctaaaagctggtgaagttagcgccgaaggtctgcgcattgtgctggaagcgggtattcgcgagccgatgatcatgcgggccaatcaggcgctgtatgcgcaattacaccccataaaagaatccattttctggcgtcaggttgacggcggacatgatgcgctttgttggcgcggtggcttgatgcaggggctaatcgacctctggcaaccacttttccatgacaggagttgaatatggcattcagtaatcccttcgatgatccgcagggagcgttttacatattgcgcaatgcgcaggggtaattcagtctgtggccgcaacaatgcgtcttaccggcaggctgggacattgtgtgtcagccgcagagtcaggcgtcctgccagcagtggctggaagcccactggcgtactctgacaccgacgaattttacccagttgcagaaggcacaatgagccagcatttacctttggtcgccgcacagcccggcatctggatggcagaaaaactgagtgaattaccctccgcctggagcgtggcgcattacgttgagttaaccggagaggttgatagcccattactggcccgcgcggtggttgccggactagcgcaagcagatacgctgcggatgcgttttacggaagataacggcgaagtctggcagtgggtcgatgatgcgctgacgttcgaactgccagaaattatcgacctacgaaccaacattgatccgcacggtactgcgcaggcattaatgcaggcggatttgcaacaagatctgcgcgtcgatagcggtaaaccactggtctttcatcagctgatacaggtggcggataaccgctggtactggtatcagcgttatcaccatttgctggtcgatggctttagtttcccggccattacccgccagatcgccaatatttactgcacatggctgcgtggcgaaccaacgcctgctagcccatttacgcctttcgctgatgtagtggaagagtaccagcaataccgcgaaagcgaagcctggcagcgtgatgcggcattctgggcagaacagcgtcgtcaactgccgccgcccgcgagtctttctccggcacctttaccggggcgcagcgccagcgcagatattctgcgcctgaaactggaatttaccgacggggaattccgccagctggctacgcaacttagtggtgtgcagcgtaccgatttagcccttgcgctggcagccttgtggctggggcgattgtgcaatcgtatggactacgccgccggatttatctttatgcgtcgactgggcagcgcggcgctgacggctaccggacccgtgctcaacgttttgccgttgggtattcacattgcggcgcaagaaacgctgccggaactggcaacccgactggcagcacaactgaaaaaaatgcgtcgtcatcaacgttacgatgccgaacaaattgtccgtgacagcgggcgagcggcaggtgatgaaccgctgtttggtccggtactcaatatcaaggtatttgattaccaactggatattcctgatgttcaggcgcaaacccataccctggcaaccggtccggttaatgaccttgaactggccctgttcccggatgtacacggtgatttgagtattgagatcctcgccaataaacagcgttacgatgagctaacgttaatccagcatgctgaacgcctgaaaatgctgattgcccagttcgccgcggatccggcgctgttgtgcggcgatgtcgatattatgctgccaggtgagtatgcgcagctggcgcagctcaacgccactcaggttgagattccagaaaccacgcttagcgcgctggtggcagaacaagcggcaaaaacaccggatgctccggcgctggcagatgcgcgttacctgttcagctatcgggaaatgcgcgagcaggtggtggcgctggcgaatctgctgcgtgagcgcggcgttaaaccaggggacagcgtggcggtggcactaccgcgcagcgtctttttgaccctggcactccatgcgatagttgaagctggagcggcctggctaccgctggataccggctatccggacgatcgcctgaaaatgatgctggaagatgcgcgtccgagcctgttaattaccaccgacgatcaactgccgcgctttagcgatgttcccaatttaacaagcctttgctataacgccccgcttacaccgcagggcagtgcgccgctgcaacttagtcaaccgcatcacacggcttatatcatctttacctctggctccaccggcaggccgaaaggggtaatggtcgggcagacggctatcgtcaaccgcctgctttggatgcaaaatcattatccgcttacaggcgaagatgtcgttgcccaaaaaacgccgtgcagttttgatgtcagcgtgtgggagtttttctggccgtttatcgcaggggcaaaactggtgatggctgaaccggaagcgcaccgcgacccgctcgctatgcagcaattctttgccgaatatggcgtaacgaccacgcactttgtgccgagcatgctggcggcatttgttgccagcctgacgccgcaaaccgctcgccagagttgcgcgacgttgaaacaggttttctgtagtggtgaggccttaccggctgatttatgccgcgaatggcaacagttaactggcgcgccgttgcataatctatatggcccgacggaagcggcggtagatgtcagctggtatccggcttttggcgaggaactggcacaggtgcgcggcagcagtgtgccgattggttatccggtatggaatacgggtctgcgtattcttgatgcgatgatgcatccggtgccgccgggtgtggcgggtgatctctatctcactggcattcaactggcgcagggctatctcggacgccccgatctgaccgccagccgctttattgccgatccttttgccccaggtgaacggatgtaccgtaccggagacgttgcccgctggctggataacggcgcggtggagtacctcgggcgcagtgatgatcagctaaaaattcgcgggcagcgtatcgaactgggcgaaatcgatcgcgtgatgcaggcgctgccggatgtcgaacaagccgttacccacgcctgtgtgattaaccaggcggctgccaccggtggtgatgcgcgtcaattggtgggctatctggtgagccaaagcggcctgccgttggataccagcgcattgcaggcgcagcttcgtgaaacattgccaccacatatggtaccggtggttctgctgcaacttccacagttaccacttagcgccaacggcaagctggatcgcaaagccttaccgttgcctgaactgaaggcacaagcgccagggcgtgcgccgaaagcgggcagtgaaacgattatcgccgcggcattcagcagcttgctggggtgtgacgtgcaggatgccgatgctgatttcttcgcgcttggcggtcatagcctactggcaatgaaactggcagcgcagttaagtcggcaggttgcccgccaggtgacgccggggcaagtgatggtcgcgagtactgtcgccaaactggcaacgattattgatgctgaagaagacagcacccggcgtatgggattcgaaaccattctgccgttgcgtgaaggtaatggcccgacgctgttttgtttccatcctgcgtccggttttgcctggcagttcagcgtgctcagccgttatctcgatccacaatggagcattatcggcattcagagtccgcgccccaatggccccatgcagacggcggcaaacctggatgaagtctgcgaagcgcatctggcaacgttacttgaacaacaaccgcatggcccttattacctgctggggtattcccttggcggtacgctggcgcagggtattgcggcgcgactgcgtgcccgtggcgaacaggtggcatttcttggcttgctggatacctggccgccagaaacgcaaaactggcaggaaaaagaagctaatggtctggacccggaagtgctggcggagattaaccgcgaacgcgaggccttcctggcagcacagcagggaagtactagtacggagttgtttaccaccattgaaggcaactacgctgatgctgtgcgcctgctgacgactgctcatagcgtaccgtttgacggtaaagcgacgctgtttgttgctgaacgcacacttcaggaaggtatgagtcccgaacgcgcctggagcccgtggatagcggagctggatatctatcgtcaggattgtgcgcatgtggatattatctctccagggacgtttgaaaaaattgggccgattattcgcgcaacgctaaacaggtaaattaatattatttataaacccataattacagaaaataattatgggttttttatttgtttgatttataggtttgatgaatatttctcttaaatagagtgaatgttgcattcagtggaaggaatttacaaacttcagcttcggataattatcaccaactggtaaagtgagcgccgtggagatttccccctattggactcattttcaggttataccccatgagtagtctgaatattaaacagggaagtgacgctcattttcccgattatcctctggcgagccccagtaataatgaaattgatttacttaatctaatcagtgttttatggcgggccaaaaaaacggtcatggcggtcgtttttgcgtttgcctgcgcaggcttgctgatctctttcatcctgccgcaaaaatggaccagcgcggcggttgtcacgcctccagaacctgttcagtggcaagagttggagaaaagtttcactaagcttcgtgtgctggatctggatatcaaaattgatcgtacagaagcatttaacctgtttatcaagaagtttcagagcgttagcttgctggaagagtacctgcgtagtagtccttatgtgatggaccaattaaaagaggcgaaaatcgacgaactggatttgcatcgcgcaattgtcgcattgagcgaaaaaatgaaagcggttgatgacaatgccagtaagaaaaaagatgaaccgagtctgtatacctcctggacgctaagttttaccgcgccaaccagtgaagaggcgcagaccgttttgagcgggtatatcgattatatctctacgttggtggtgaaagagagcctagaaaacgtccgtaataaactggagatcaaaacccagtttgaaaaagaaaaactggctcaggatcgcattaaaacgaaaaatcaacttgatgcaaacattcagcgcctcaattatagtctcgacattgccaacgcggcaggaattaaaaagcccgtttacagtaatggtcaggccgttaaagatgaccccgatttttctatttctctcggtgcagacggtattgaacgcaaactggaaatagaaaaagcggtcactgacgttgcggaactgaacggtgaattacgtaatcggcagtatcttgtcgagcaattaacaaaagcacatgtcaacgatgtgaattttacgccgtttaaatatcagttaagcccgagtttgccagtgaaaaaagacggtccgggtaaggcgattattgtgatcctttccgcgttgatcggcgggatggtggcttgtggtggcgtgctgttgcgctatgcgatggcatccagaaaacaggatgccatgatggcagaccacttagtttaactatttgcggtactaggtgccgttcgtccgagcggcaccacaagcggcgttccggcaactggatcgtcaatgatcatgcagcgcagaccataaatgcgctcaatcagttcagcagtgacaatctccttcggcgctccctgagcaacaattttcccttcccgcaatgcaatcaaatggctggcgtaacgacaggcctgattaagatcgtgcagcaccgccgccagggtatagcctttttcgcggttcagttcgcttaacaactccagcaaatcaatctgatgactgatatccagccaggtcgtgggttcgtcgagcagcataattgccgtttcctgggccagcaccatcgcgatccacgctcgctggcgttgtccgccagaaagggtatccacgctttgatctgccagatgagttattcccgtggcctgcattgctttcgttaccgcttcttcatcctctttgcgccagcgggtaaacagcggttgatgcggataacgtccacgcgccaccagctcctgcacggtgatatcgcccggcgtggtagcattttgcgccaacagaccaatccggcgtgcaacctctttactggcgtaatgttgaatgtgctcgccatccagccagacatgcccatgagcaggcgtcatcaggcggcttaaggtacgcagtaacgtggatttaccgcagccatttggcccgataattgccgtgaagtgaccatcaggtatttctacagtcagattttccgcaacggtatatttgccatatcccagggttaactgttcgccgcgcaaacgggctacactttcggtcattttttgcgagactcctgaattaacaagacgataaggtaaataccgccgaggctgacggtaacgacgccaaccggaagttgatacggcataaacagttgttgggcgcagagatcggccgccagcagtaacagcgccccgcatagcgccgcctgggttagcccccagcgagcggtgccgctaatgcgtcgggcaatgtgcggtgcgactaaagcaataaaggaaatcggcccggcaagcgctgttgccgcagcggtaagcaccactgcaaccagcatcattaacagacggctacgttcgacgctgacgcccagcgcacacgcggtatcatcgcccatttccagcaagcgcatccggcgtaccagtaaggcggcggcaatgagcatcaatataatgatgggtgcggaagggctggtttttgcccacgtcaggccgttgaggcttccggcattccacaaacctgctgttagcgccgtttctaaagacgctttcagcaacagccaggtattaaaggccaccagcatggcgcgaacgccgataccgataataatcaaccgaaaggtgtcgatgccgttgcgccaggcgagcagccagaccagcaggctagtgacaatgccgcccaccattgcactcagcgcgatagccgtcaggtcctgaccaaacagcaccatcgccaccagcacgccgctccacgccccggtgttaaagcccattacgtcagggctgccgagcgggttacgcatcaggctctgaaaaatcgcgccactgacgcccagtgctgcgccaatcaacagcgccatcagcacgcgtggtaaacgccattcggtgaccaccatcgtcatactgcgcggcgcatcgcccatcagcgcggcgaatacctggctggtttccagcgtgacggcaccgctgcgtaatccccagatacctgcaaccacacaggcggaaaccagcagcaaacaggtgatgagtaatcggcgagagacgtaaatcatgcaccacctcgcgttttacgtcgcacgaggaagatcagcaccggtgcaccaataaacgcactgaccacagaaacgcgcagttcgccgggcacaatcacccgcccgatgatatcggcaaacagcagcagggcaggggtagcaagtagcgtgacgggcaggctccagcgatgatcggcacccaccagccaacgcgccatatgcggcatcatcaggccaataaaggcaatcgggccaactattgccgtcgcactaccacaaagcacggtaatcgccagcagaccaatcaactgtgtgcgcgccacgcgactgcccagcgccgtcgcggtgtcgctgccgaggctcaaactgttcagcgcgcgactcagtaatagcgcagttgctccggcgatcagcaccgggatcagcaccacttttaaggtatgtagattgcgaatatccaggctaccggcttgccagaaacgcaactgatcgtagacgtcaggattaagcagggcgatgccgctggtcagtccttccagcaccgccgccagcgccacgcccgccagggttaaacgcaccggacttaactgcccgccgccctgactgccggtaaaggcaacaatcaaactggccaccagcgccccggcgaaggccatcgccagttgttcctgcgcggaagagtaaccaaacagcgccgcacccagcacaatggcaaagctggctccggcgttcacgccaagcaagccggggtcggcaagtgggtttcgggtgagggtttgcattaacgccccggcaaggccaagcgcgccgcctgccagtaaaccggcaagggtacgcggcagccgcgcgtcgagcacgatggtgcagtcggcgctctggcaggtgccggagaaggcctccagcactacggaagcggggagactttttgccccaatgagcaggcttaatgccgtcgcgataatcagtaataacagcaatccgggcacggcaatggcgcgtgtcacggcaacagaaccagacatacgaacttccatgataatgaaattaattatcgttatcgatcttatttggatatgttagcatgtgcagcctaagaataggtatttaaaatatttgatggcaaggcattgtaatgaataaacaatcctggctgcttaacctcagcctgttgaaaacgcacccggcgtttcgcgcagtattcctcgctcgtttcatcagtattgtgtctctgggtttgctcggcgtcgcggtgccggtgcagatccagatgatgacacattccacctggcaggtggggcttagcgtgacgctgaccggcggcgcgatgtttgttggcctgatggtcggcggtgtgctggcggatcgctatgagcgcaaaaaagtgattttgctggcgcgcggcacctgtggcattggcttcattggactgtgccttaatgcactgctgccggagccgagtttgctggcaatctatttacttggtttatgggatggttttttcgcaagccttggcgttacggcgctattggcggcgacaccagcactggtagggcgtgaaaacttaatgcaggccggggcgatcaccatgttgaccgtgcgtctggggagcgtgattagccccatgattggcggtttattgctggcgaccggtggcgtagcctggaactacgggctggcggcggcgggcacgtttattaccttgctaccgttgttaagccttccggcgttgccaccgccaccgcagccgcgtgagcatccgttgaaaagtttactggcaggatttcgttttctgcttgccagcccgctggtgggcgggattgcgctgctgggtggtttattgacgatggcgagcgcggtgcgggtactgtatccggcgctggctgacaactggcagatgagtgcggcacagattggttttctctacgcggcgatcccgctcggcgcggctattggtgcgttaaccagcgggaagctggcacatagtgcgcgaccagggttattgatgctgctctccacgctgggaagcttcctcgccattggtctgtttggcctgatgccgatgtggattttaggcgtggtttgtctggcgctgttcggctggttgagtgcggtcagcagcttgctgcaatacacaatgctgcaaacgcaaaccccggaagcgatgttagggcggattaacggtttgtggacggcgcagaacgtgacgggcgatgccataggcgcggcgctgctgggtggtttgggcgcgatgatgacaccggttgcttccgcaagcgcgagcggttttggtttgttgattatcggcgtgttgttattgctggtgctggtggagttgcgacattttcgccagacgccgccgcaggtgacagcgtccgacagttaatgcttaaaacagcgccttaagcctatccagcacttgcatggcgctgtagtaatccagacggaacgtctcggttcccagcgcataaacctgcttgttttgtactgcaggcaggtgcgcgagcagcggattagcataaatagcatcggcatctttctgatcaccggcgaacaggaatagactctcgccatttaaccctgcagccagattttccccaccaagctgaatgatgtcatggcgtttaccctgactttggctggcatttaaccctgcgggtaacttcgccagcgtaaagccgagttgttccagcatctgcccttgtgcactttctggcgtccagagattggcactgtgtgcagcggcagtatagacaatggcagtgaccggctgcggcggtaatttgatttgctctttcgccgccgccagttgcttatcaaactgcgcaatccgctctgccgcttgtttctcatgcccggtaatttcgccaagttgcgttaacaggctctgccagcttttgtcgtcgtaattgatgattaatgtcggggcgatggtggaaagctgatcatacagtgccagcgcgctatccccgccggttgcgctaattaaaatcagatccggcatttgcgcggcaacggcttcggcgctcggttcgccgatatagagccgttgcagtttgcgttctttcgccaccttgctccactggcgtaaaaagccctggtcatccgcgacgcggttattcggcgtggtcgcgccgctggcgatcaccggagcatcaatcgccagcagactgccggtcagggtgacgctggtggaaacaatacgctgcggctggctttccagtgtatgtgtgccacggctgtcagtaatctgacgcggccagtcagcggcctgaactgcggctattccactaagcaaaagtcctgttaatagaagggcgttgcggtagagcggggcgagtctcacaaatcagcttcctgttattaataaggttaagggcgtaatgacaaattcgacaaagcgcacaatccgtcccctcgcccctttggggagagggttagggtgaggggaacagccagcactggtgcgaacattaaccctcaccccagccctcaccctggaagggagagggggcagaacggcgcaggacatcacattgcgcttatgcgaatccatcaataatgcttctcattttcattgtaaccacaaccagatgcaaccccgagttgcagattgcgttacctcaagagttgacatagtgcgcgtttgcttttaggttagcgaccgaaaatataaatgataatcattattaaagcctttatcattttgtggaggatgatatggatacgagtctggctgaggaagtacagcagaccatggcaacacttgcgcccaatcgctttttctttatgagcccgtaccgcagttttacgacgagtggatgtttcgcccgcttcgatgaaccggctgtgaacggggatagccccgacagtcccttccagcaaaaactcgccgcgctgtttgccgatgccaaagcgcagggcatcaaaaatccggtgatggtcggggcgattcccttcgatccacgtcagcctagcagcctgtatattcctgaatcctggcagagcttctcccgtcaggaaaaacaagcttccgcacgccgtttcacccgcagccagagcctgaatgtggtggaacgccaggcaattccggagcaaaccacgtttgaacagatggttgcccgcgccgccgcacttaccgccacgccgcaggtcgacaaagtggtgttgagtcggttgattgatatcaccactgacgccgccattgatagtggcgtattgctggaacggttgattgcgcaaaacccggttagttacaacttccatgttccgctggctgatggtggcgtcctgctgggggccagcccggaactgctgctacgtaaagacggcgagcgttttagctccattccgttagccggttccgcgcgtcgtcagccggatgaagtgctcgatcgcgaagcaggtaatcgtctgctggcgagtgaaaaagatcgccatgaacatgaactggtgactcaggcgatgaaagaggtactgcgcgaacgcagtagtgagttacacgttccttcttctccacagctgatcaccacgccgacgctgtggcatctcgcaactccctttgaaggtaaagcgaatagccaagaaaacgcactgactctggcctgtctgctgcatccgacccccgcgctgagcggtttcccgcatcaggccgcgacccaggttattgctgaactggaaccgttcgaccgcgaactgtttggcggcattgtgggttggtgtgacagcgaaggtaacggcgaatgggtggtgaccatccgctgcgcgaagctgcgggaaaatcaggtgcgtctgtttgccggagcggggattgtgcctgcgagcagtccgttgggtgagtggcgcgaaacaggcgtcaaactttctaccatgttgaacgtttttggattgcattaaggagcgaggatgagcattccattcacccgctggccggaagagtttgcccgtcgctatcgggaaaaaggctactggcaggatttgccgctgaccgacattctgacgcgacatgctgcgagtgacagcatcgcggttatcgacggcgagcgacagttgagttatcgggagctgaatcaggcggcggataacctcgcgtgtagtttacgccgtcagggcattaaacctggtgaaaccgcgctggtacaactgggtaacgtcgctgaattgtatattacctttttcgcgctgctgaaactgggcgttgcgccggtgctggcgttgttcagccatcagcgtagtgaactgaacgcctatgccagccagattgaacccgcattgctgattgccgatcgccaacatgcgctgtttagcggggatgatttcctcaatactttcgtcacagaacattcctccattcgcgtggtgcaactgctcaacgacagcggtgagcataacttgcaggatgcgattaaccatccggctgaggattttactgccacgccaagtcctgctgatgaagtggcctatttccagctttccggtggcaccaccggcacaccgaaactgatcccgcgcactcataacgactactactacagcgtgcgtcgtagcgtcgagatttgtcagttcacacaacagacacgctacctgtgcgcgatcccggcggctcataactacgccatgagtagcccaggaagcctgggcgtctttcttgccggaggaacggttgttctggcggccgatcccagcgccacgctctgtttcccattgattgaaaaacatcaggttaacgttaccgcgctggtgccacccgcagtcagcctgtggttgcaggcgctgatcgaaggcgaaagccgggcgcagcttgccagcctgaaactgttacaggtcggcggcgcacgtctttctgccacccttgcggcgcgtattcccgctgagattggctgtcagttgcagcaggtgtttggcatggcggaagggctggtgaactacacccgacttgatgatagcgcggagaaaattatccatacccagggttacccaatgtgtccggatgacgaagtatgggttgccgatgccgaaggaaatccactgccgcaaggggaagtcggacgcctgatgacgcgcgggccgtacaccttccgcggctattacaaaagtccacagcacaatgccagcgcctttgatgccaacggtttttactgttccggcgatctgatctctattgatccagagggttacatcaccgtgcaggggcgcgagaaagatcagattaaccgtggcggcgagaagatcgctgccgaagagatcgaaaacctgctgctgcgccacccggcggtgatctacgccgcactggtgagcatggaagatgagctgatgggcgaaaaaagctgcgcttatctggtggtaaaagagccgctgcgcgcggtgcaggtgcgtcgtttcctgcgtgaacagggtattgccgaatttaaattaccggatcgcgtggagtgtgtggatagtcttccgctgacggcggtcgggaaagtcgataaaaaacaattacgtcagtggctggcgagtcgcgcaagtgcctgaaggagagaacacgatggctattccaaaattacaggcttacgcactgccggagtctcacgatattccgcagaataaagttgactgggcctttgaaccgcaacgtgccgcgttgttaatccatgatatgcaggactattttgtcagcttctggggcgagaactgcccgatgatggagcaggtgatcgcgaatattgctgcgctgcgcgactactgcaaacagcacaatatcccggtttattacaccgcccagccgaaagagcagagcgatgaagatcgggcgctgttgaatgatatgtgggggccgggcctgacccgcagcccggaacagcaaaaggtggtggatcgcctgacgccagatgccgacgacacggtgctggtgaagtggcgctacagcgcgtttcatcgttctccgctggagcaaatgctgaaagagagtggacgtaaccagctgattattaccggggtatatgcccacattggctgtatgaccaccgcaaccgacgcatttatgcgcgatattaaaccgtttatggtggcggatgcgctggccgatttcagccgtgacgagcatttgatgagcctgaaatatgtggccggacgttctggccgggtggtgatgactgaagaattactgccagcacctatccccgccagcaaagcggcgctgcgtgaggtgatcctgccgttgctggacgagtccgatgaaccgttcgatgacgacaacctgatcgactacggtctggatagcgtgcgcatgatggcgctggcggcgcgctggcgcaaagtgcatggtgatatcgactttgtcatgctggcgaaaaacccgaccatcgacgcctggtggaagctactctcccgcgaggtgaaataatggatttcagcggtaaaaatgtctgggtaaccggcgcaggtaaaggtatcggctacgccacggcgctggcgtttgttgaggcgggagcgaaagttacaggttttgatcaagcgttcactcaggagcaatatccctttgcgaccgaagtgatggatgttgccgacgctgcgcaggtcgcgcaagtgtgtcagcgactgttagctgaaacggagcgactggacgcgctggtcaatgcggcgggaattttacgcatgggcgcgaccgatcagctcagtaaagaggactggcagcagacttttgcggttaacgtcggcggtgcgtttaacctgttccagcaaaccatgaaccagtttcgccgtcagcggggcggggcgattgtcactgtggcgtccgacgccgcgcacacgccgcgtattggcatgagtgcttatggcgcaagcaaagcggcgctgaaaagcctggcgttgagcgtcgggctggaactggcgggtagcggcgtgcgctgtaatgtggttagccctggctccaccgacaccgatatgcaacgcacgctgtgggtgagcgatgacgccgaagaacagcgtattcgcggctttggcgagcagtttaaactcggcattccgctggggaaaatcgcccgtccacaagagatcgccaacacgattttgttcctcgcctctgacctcgccagccatattaccctacaggatattgtggtcgatggcggcagtacgctgggggcataagcatgatctggaaacgccatttaacgctcgacgaactgaacgccaccagcgataacacaatggtggcgcatctgggaattgtgtatacccgtctgggcgatgatgtgctggaagccgaaatgccggttgatacccgtactcatcagccgttcggtttactacatggcggcgcgagcgcggcgctggcggaaacgctgggaagcatggccggatttatgatgacccgcgacggacagtgtgtggtaggcacagaacttaatgcaacacaccatcgcccggtgtctgagggaaaggtacgcggcgtctgccagccgctgcatcttggtcggcaaaatcagagctgggaaatcgtcgttttcgatgaacaggggcggcgttgctgcacttgtcggctgggtacggcagttttgggatgaacccgacagaattagatgagattgcaggaaaactcggttaacggagtgatcgagttaacattgttaagttaaatattggtttcaactccgatttacatggttgctgtgttgttaaattgtacaaagatgttatagaaacaaaatgtaacatctctatggacacgcacacggataacaactatgaacaaaagtgggaaatacctcgtctggacagtgctctctgtaatgggagcatttgctctgggatacattgctttaaatcgtggggaacagatcaacgcgctgtggattgtggtggcgagcgtctgtatctatctgatcgcttaccgtttttatgggctgtatatcgccaaaaatgtgctggcggttgacccgacgcgtatgacgccagcggtgcgccataacgacgggctggactatgtgccgacggacaagaaagtgctgttcggtcaccattttgcggccattgccggagcaggtccgctggtggggccggtactggcggcgcaaatgggctacctgccggggatgatctggctgctcgctggggtggttctcgccggtgcggtgcaggatttcatggtgctgtttgtttctacgcgccgtgacggtcgcagcctgggtgagctggtcaaagaagagatggggccaaccgccggggtgattgcgctggtggcctgctttatgatcatggtcattatccttgcagtgctggcgatgatcgtggtgaaagccctgactcatagcccgtggggaacatataccgttgcgttcaccattccgctggcgctgtttatggggatctacctgcgctatctgcgtccggggcgtattggcgaagtgagcgtcatcggtctggtattcctgattttcgccattatctctggcggctgggtggcagaaagtccgacctgggcaccgtactttgactttaccggcgtgcagttgacctggatgctggtgggttacggttttgtggcggcggtgctgccggtgtggttactgctggccccgcgtgactacctctctaccttcctgaaaatcgggactatcgtcggtctggcggtaggcattttgattatgcgcccgacgctgaccatgcctgcgctgaccaaatttgtcgatggcactggcccggtatggaccggtaacctgttcccgttcctgtttatcaccatcgcctgtggcgcggtgtctggcttccatgcgctgatctcttctgggaccacgccgaagatgctggcgaacgaagggcaggcgtgctttatcggctacggtgggatgttaatggaatccttcgtggcgattatggcgctggtttccgcctgtatcatcgatccgggcgtgtattttgccatgaacagcccgatggcggtgctggctccggcagggacggcggatgtggtcgcttctgccgcgcaggtggtgagtagctggggctttagcattacaccagatacgctaaaccagattgccagcgaagtgggtgaacagagcatcatttcccgtgcgggcggtgcgccgacgctggcggtggggatggcctacattctgcacggcgcgctgggcggcatgatggatgtggcgttctggtatcacttcgccattttgtttgaagcactgtttattctgacggcggtggatgcaggtacgcgtgctgcgcgctttatgttgcaggatctgctgggcgtggtgtctcctggcctgaagcggaccgatagtctgcctgctaacctgctggcaacagcgctgtgcgtactggcgtggggctacttcctccatcagggcgtggtcgatccgctgggcggcattaacactctgtggccgctgtttggtattgccaaccagatgctggcagggatggcgctgatgctctgtgccgtggtgttgttcaagatgaaacgtcaacgttacgcctgggtggcgctggtaccaacggcctggctgctgatttgtaccctgaccgcaggctggcagaaagcgtttagcccggatgcgaaagtcggcttcctggccattgctaataagttccaggcaatgatcgacagcggcaatattccgagccagtatactgagagtcagctggcgcaactggtgttcaacaaccgtctggatgccgggttaaccatcttctttatggtggtcgtggtggttctggcactgttcagcattaagacggcacttgcggcattgaaagatccgaagccaacggcgaaagaaacgccgtatgaaccaatgccggaaaatgtcgaggagatcgtggcgcaggcaaaaggcgcacactaaagtcagagtgagggggggatgttggcgaatgttggcttagtgcccagggttccctctcaccctaaccctctccccggtggggcgaggggactgaccgagcgcgttgatagcatttgtaggccggataaggcgttcacgccgcatccggcactctttcagcaacatggttagcggaggccaagatgtttgatagtctggcaaaagccggaaaatatttaggtcaggcggcgaagctgatgattggtatgcctgattacgacaactatgtcgaacatatgcgggttaaccatcccgatcaaacgccgatgacctacgaagagtttttccgtgagcggcaggacgcgcgctacggtggaaaaggcggcgcgcgctgctgctaaatttgtacgtcaggctttaaagctttccacttttttgaacgctgcacgcaacgtatctggtgtcagcgtgactggcaggtaatgaatggactccaccggacgcagggtgtgggcaatcactttgtcgatctccgcctgattattgatatccacttccagctccgccagtgtagtcggcagatgaaaacgctgatacgctccagttaattgcgccagcacatcatcctgacccagcaaggcgctttgcaccagaattccgtaggcgactttggtgccgtggagaaacttctcggtttgcggcagcacggtcagaccgttatgcacggcatgagctgccgccacacgcgtaaaacgatcgcccagaccaccaaccatcccaccaccagcaataatagcatccaccacatcgcaaaaactttgcgttaactgttgattttgctgatcgctcagcgcctgttcgctactgtttaacaagacgtcgcgaatggcttgcgcattattgatccccagtcgcacggttagcggcaacgtttctggttgcggagccagcaccaccgcttcataccatttcgccagcgtgtcaccgatccccgccagcagatattgttgcggtgcattgaggataatctccggttccaccagcaccataaaattggcgtcgtcgaaaatctcataatgcagcgcctgtccggcatcattataccagacggagagcggtgtccaggcggcgcaggtggcggcgatcgtcggaacggcaacaaacggcagaccgagacggcgggcgagggctttcgcggtgtcgagcagtgcaccgccaccgacgccaatcaccacgctgcggtcgtcaccggactcagccgccagttgttgtacatcgctttcgctgcaatgaccgcgaaacaaaatatgctttgcccctggcagtccaaacgctggcggaagtttggtttgcgccgcagcaatggcgcgtttgccgtagatccacaccgcgcgagaaagttgttcatcagtgaaaaaatcgtgcaggtgattgaaacttcctggatgactaaagtagttagccgggccgacgaccacgcggataggattgtgaggcatgttgtgttgtccttattgttttatttagacatctaaacgtcttgattgccaaatactagcatcgtgttatagtgccttcaacacgcaacttcgtcaggtacaataaaaatgacaaataaccctctgattccacaaagcaaacttccacaacttggcaccactattttcacccagatgagcgcgctggcgcagcaacaccaggcgattaacctgagccaaggctttcctgattttgatggtccgcgctatttacaggagcggctggcgcaccacgttgcacagggggcaaaccaatacgcgcccatgaccggcgtgcaggccttgcgcgaggcgattgctcagaaaacggaacgtttgtatggctatcaaccagatgccgatagcgatatcaccgtaacggcaggggcgacggaagcgttatacgcggcgattaccgcactggtgcgcaatggcgatgaagtgatttgttttgatcccagctatgacagttacgcccccgccatcgcgctttctgggggaatagtgaagcgtatggcactgcaaccaccgcattttcgcgttgactggcaggaatttgccgcattattaagcgagcgcaccagactggtgatcctcaacactccgcataaccccagtgcaactgtctggcagcaggctgatttcgccgctttgtggcaggcgatcgccgggcacgagatttttgtcattagcgatgaagtctacgagcacatcaactttagtcaacagggccatgccagtgtgctggcgcatccgcagctgcgtgagcgggcagtggcggtttctagttttggcaagacctatcatatgaccggctggaaagtgggttattgtgttgcgccagcgcccatcagcgccgaaattcgcaaggtacatcagtatctgacctttagcgtgaataccccggcacagctggcgcttgctgatatgctacgtgcagaacctgagcattatcttgcgttaccggacttttatcgccagaagcgcgatattctggtgaatgctttaaatgaaagccggctggagattttaccgtgtgaaggtacatactttttgctggtggattacagcgcggtttctaccctggatgatgttgagttttgccagtggctgacgcaggagcacggcgtagcggcgattccgctgagcgtgttttgcgccgatcccttcccacataaactgattcgtctctgttttgccaagaaggaaagcacgttgctggcagcagctgaacgcctgcgccagctttaattatttaaccgtccaggcgcgggaatattgacggtcggcaaacaactcttgcaggccgttaatttgcttcaggcgcagcacttcgtcgctgtccattcccagctctttgccaattttattatcgtcccatcccaactggctaagttcacggacgatttcgctcatggcggtgatttgatggcgtccacgagcgcgattatgacgaatagtcgcggcgatgcgttgattacgcgtaccttccagacaggtcaccggcaaataaccttttaagcgtaattttaaactactactgcctttaccaatttcatggcggtgaaaaccatccacgatttccatggcatttttatccgtatgtgtgaccacaatgggttgggtaaaaccatctatttcaatggatttttgcagcagttttttttcgggtggtgccacgttgtttgggttgtaatcattaggcataagttggctgtttttaacccacagaacgcaatccactggctcttcacgaaaggggctaacctgatggatcgccatgcggatttcattaatcgctttgatgcgatcatcttccggcaagctggcgagaaattgcgttaaatcctgcgttaatcgttgttgcatagtatcccccattcctgacgttttccttttatccgttcgttataacgctgatagttcttgctttttgtggggctaaaacttaatgcccgacaccagtaatcgttattgagtaaaactttgcatatccgccgccaggaggggatatctttcgcgccaatgtccccttgctgggtttgtggaacctcgatgccttttttctgataccagtgcaaataaatggcgattttattgcggtaatgctcagctgttttttccggcatgctattgagcagcaataatgcatattcttgccagtctaaatgttctggcttgaggattttccgatgcccatagaaatgattgtcatgtccggcgtaaatgccgccactttttaccccgctgactcgtgcgcacatagcagcccagcgatccggttcgataacgtgatagagccataatccttgtcgttgctccgggccaaaaggttcgcaaattcgcatatgacgcagaggaacgcctgcctgatacattaggttatacagtgggttgcagagactttgatgatttgcataccaggtccagatatcagccactttccagtcgtaaatggggtaaatgtaccagctatgaccgcctggtgcggccgtagtccagggtttatcgtcggcaaaacgttgtttatttaaactggcgatggcgacaaaacggttgtaggactcatccgcacggatgccgatcatcatcgccgccggacgtttttgactaaaccattcggcaaactcacgtacaaattgttcgaaggtcatgcctggctggtaaaagcagaaaaagtcagggtcggttatcgcatcttggggaggttgacgtacccattcgacatcaggttcccagcactgccattcgggttggtattgactaagggaattttgcgtcgtaagcgggagcgcaacccagtaaaactcttcgatgacatcggtgtacaactcgcgcagggactgaacatagttaatggtgcaagagaattgcgcctcccagtcgataaacaaaacgcagatttttttgcccatttgtcgggcaagttcggctgtcagatgcagcattaaaccagagtctttgccgccagaaaaactgacacaaacgcggggtagggtgttgagtgtccaggtaatacgctctcgtgcagcttccagaatattgagcggaagaggaattttataaatagacatctgaagacgctctctgaacgttacagggtgatcagtgagataagtctgttaattataaagtaaacactgtaaagcagagtgttttatttttcattcgcgctgtgaataaatagatgaaagttatagtagctgtctgtagttatatatcaaaaactctcatttagacggtcaataaatcgggagaacaccaaattatttaaagaagatttattataggaaatgtaaagctttatactaggtaacggatgttctagttttatctcttttaagttaagaaagtcacggtaggaattataaagttcataggggactattcccagtaaatctgtaactgcaatgctattaatgattgtcagcaaagaggaaccacgaaaactgattttgcgattcataaatctctcgtctatttccatttgaatatcatcaacccctgcacttttagatattaattgggtgaactcttctgccataatttgttcataagtgctattgtcagtaattcgtggatgcctattactacaaattagagtattgcgaatcgtatgcaatggcatgcaaatgacggaacggctgatcactggcatttgggtgatcaccagatcggctttgcggtgaaccaacagttcttcagcattctctgcactcatgaggatatcatggcactcaatctcgacagaggaatcttgccgtaggcagcggatcagcatactattattagagcaagaaatgagctgagggccgtagataataaagtttttctttagttcggacttattgactatattaattgtttgttcaaggcctctgagatttttctcaagatggtgatgcagatttaaccctgttgtcgtcggcgcgataccttttccactgcgaatgaataaagggtcattaaattgcgcacgtaagcgttgtaagctctggctcacggcacttggggtgatatatagactttcagcagctttgctaatgcttaaatgctggtaaatacactcaaatatgacaagaagatttaagtcgaactttttcaagtcgtagagattggccatacactactccggttatatttttcttccatgatatattcacttaatcaatgttttttgcgtatatatttttattgattatgtttttttgcttaactcaggattaagtttttctaaaatagcacagccacttagggcagagcgagcaattcatgcttttttaggatggttgaaaagcagggatatagttcaaccatccatgaattaccttttatttattccccataatgatattaagcgttttctgatcgggcaaccccacggcctgttgtagcgtattttccttactcatgtaatagatagccggcgtgacatttgcccccagatcgtccatcagtttctcattgtcacttaacactttcatttgctctgtacttacgtttgcaggcacgtttagcttaagcttgccaccagaggcttcatattgttgccaggtttttgcgggatctttggaggcaagaattgccgctgctgtcgccgggctttctggcttgataaccccaaccaacaatgttcttaattgcactttgccagaatctacccacgggcgcgcctgctgccagaactgtttacaatatgggcagaacggatcggcgaagacgtagacaatgaccggcgcatcttttttaccgtcgaggagccagtgggattgttccatccgttgccacatttcgcgtccggctggtgcgtaaatttctttttcgataagtgtgttactcaggttttcacctttctcgttgtacatgtaaccagagatagcgtgcttaccatctggagtcaggtagatggtgacgcccatatcctgacactttccgagataacctttcattcctccgggggcatcgaatgttttgatgattgtaatgccctgtttttcaatcgcttttactggagcaggaagttcctctgcgaaggcgattgcaggaagcagagccagtaaaagtatcttttttaacattaatttgtccttttcagtcagtgcaaaagtcgagtaaaaggcataacctatcactgtcataggtaagagcttagatcaggtgattgccctttgtttatgagggtgttgtaatccatgtcgttgttgcatttgtaagggcaacacctcagcctgcaggcaggcactgaagataccaaagggtagttcagattacacggtcacctggaaagggggccattttactttttatcgccgctggcggtgcaaagttcacaaagttgtcttacgaaggttgtaaggtaaaacttatcgatttgataatggaaacgcattagccgaatcggcaaaaattggttaccttacatctcatcgaaaacacggaggaagtatagatgtccttgattaacaccaaaattaaaccttttaaaaaccaggcattcaaaaacggcgaattcatcgaaatcaccgaaaaagataccgaaggccgctggagcgtcttcttcttctacccggctgactttactttcgtatgcccgaccgaactgggtgacgttgctgaccactacgaagaactgcagaaactgggcgtagacgtatacgcagtatctaccgatactcacttcacccacaaagcatggcacagcagctctgaaaccatcgctaaaatcaaatatgcgatgatcggcgacccgactggcgccctgacccgtaacttcgacaacatgcgtgaagatgaaggtctggctgaccgtgcgaccttcgttgttgacccgcagggtatcatccaggcaatcgaagttaccgctgaaggcattggccgtgacgcgtctgacctgctgcgtaaaatcaaagcagcacagtacgtagcttctcacccaggtgaagtttgcccggctaaatggaaagaaggtgaagcaactctggctccgtctctggacctggttggtaaaatctaaatttccttcgtctttcacgccatagcggcgttggcgtcgcccgctcaccccggtcacttacttgtgtaagctcccggggattcacaggctagccgccttgctctgacgcgaaatacttcggaaattcacctaattcttcgggtgctgcggcacccgattttcttccccgcaccatgatgcaagctgcatccaggtagccgcagaggccgcttgcatgatgatgtttaaagcccaggagataaacatgctcgacacaaatatgaaaactcaactcaaggcttaccttgagaaattgaccaagcctgttgagttaattgccacgctggatgacagcgctaaaagcgcagaaatcaaggaactgttggctgaaatcgcagaactgagtgacaaagtcacctttaaagaagataacagcttgccggtgcgtaagccgtctttcctgatcaccaacccaggttccaaccaggggccacgttttgcaggctccccgctgggccacgagttcaccagcctggtactggcgttgctgtggaccggtggtcatccgagcaaagaagcgcagtctctgctggagcagattcgccatattgacggtgattttgaattcgaaacctattacagcctctcttgccacaactgcccggacgtggtgcaggcgctgaacctgatgagcgtactgaacccgcgcatcaagcacactgcaattgacggcggcaccttccagaacgaaatcaccgatcgcaacgtgatgggcgttccggcagtgttcgtaaacgggaaagagtttggtcagggccgcatgacgttgactgaaatcgttgccaaaattgatactggcgcggaaaaacgtgcggcagaagagctgaacaagcgtgatgcttatgacgtattaatcgtcggttccggcccggcgggtgcagcggcagcaatttactccgcacgtaaaggcatccgtaccggtctgatgggcgaacgttttggtggtcagatcctcgataccgttgatatcgaaaactacatttctgtaccgaagactgaagggcagaagctggcaggcgcactgaaagttcacgttgatgaatacgacgttgatgtgatcgacagccagagcgccagcaaactgatcccagcagcagttgaaggtggtctgcatcagattgaaacagcttctggcgcggtactgaaagcacgcagcattatcgtggcgaccggtgcaaaatggcgcaacatgaacgttccgggcgaagatcagtatcgcaccaaaggcgtgacctactgcccgcactgcgacggcccgctgtttaaaggtaaacgcgtagcggttatcggcggcggtaactccggcgtggaagcggcaattgacctggcgggtatcgttgagcacgtaacgctgctggaatttgcgccagaaatgaaagccgaccaggttctgcaggacaaactgcgcagcctgaaaaacgtcgacattattctgaatgcgcaaaccacggaagtgaaaggcgacggcagcaaagtcgttggtctggaatatcgagatcgtgtcagcggcgatattcacaacatcgaactggccggtattttcgtccagattggtctgctgccgaacaccaactggctcgaaggcgcagtcgaacgtaaccgcatgggcgagattatcattgatgcgaaatgcgaaaccaacgtgaaaggcgtgttcgcagcgggtgactgtacgacggttccgtacaagcagatcatcatcgccactggcgaaggtgccaaagcctctctgagtgcttttgactacctgattcgcaccaaaactgcataagaagaagtaagattcacctgcaattgcttagccgccggggtcaaacctggcggcttttttatggcattaaaaagccccgccgggatggctccgggcagggcgggatacttattctggcaattaacgcacaaccagcaccggcagattggcgtggcggatcacgctgctggcgttagaacctaacagatgggtgctaatgcttgggttgcgagaaccaataactacaacatcagcccccagttcttctgccaactcattgacttcatcccgcacgctaccaaaacggacatgttgtttaatgcgggaaggatcgatggtgaagtggctgaccatcgtttgcagacgttcttgtgcttcatgttgcagatgctcttcaaaacgacgcacatcagcggcaaaacggtgcaggctcaggctggcactcccgggtagtacgtgaagtagatgaataactccgtcatcctgggcgaggaattcagcgtggcgaacagctttgtcgctcaattccatttcaaatacatcaactggcataatgattgtcttatacataaccctttctccctgttaatcatgaacaaatcattcgccatgattataatatttatccctgatatttgtctggttctttttccttacgaactgtttctgtgatgaatatattctcactgaacaccaggaattctcccaaaacctgtggtaccgcccgttttcccgctgtgatagctacccttaaagactgactcttttttgaactgtctctggaggttgcatgaaagcattgacttatcacggcccacatcacgttcaggtagaaaatgttcccgatccgggcgttgaacaggcagatgatattattctgcgtattacggcaacggcgatctgtggctctgacctccatctttatcgaggcaaaatacctcaggttaaacatggcgatatttttggtcatgaatttatgggggaagtagttgaaaccggaaaggacgtaaaaaatttgcaaaaaggcgaccgagtggtaattccgttcgtcattgcttgtggcgactgttttttctgtcgattgcaacaatatgccgcctgcgaaaataccaatgcgggtaaaggcgctgcgctcaataaaaaacagataccagctccagcggcattgtttggttatagtcacctgtatggcggcgttcctggtgggcaggcggaatatgtccgcgtccctaaagggaatgtggggccgtttaaagtaccgcctttgcttagtgatgataaagcgcttttcctttctgatattctgccaacggcatggcaggcagcaaaaaatgcgcagatccaacaaggtagtagcgttgcagtctatggtgctggtcctgtgggattgttgacaatcgcctgtgcacggttgctcggtgcggaacagatttttgttgttgatcatcatccctaccgcttgcatttcgccgccgaccgctacggcgcgatcccgattaattttgatgaagacagcgatccggcacagagtattattgaacaaacggcaggtcaccggggcgtggatgcagtaatagacgccgtcggttttgaagcgaaaggcagcaccacggaaacggtgctgactaacctgaaactggagggcagcagcggtaaagcgttgcgtcagtgtattgcggcggtcaggcgtggcggcattgttagcgtaccgggcgtctacgctggatttattcacggtttcctgtttggcgacgcctttgataaagggttgagctttaaaatgggacagacccacgttcacgcatggctgggagaattattaccgttaattgagaaaggattactgaaaccagaagaaattgttacccactatatgccgtttgaagaggccgcccggggatatgagattttcgaaaaacgtgaagaggagtgccgtaaggtgattctggtacccggtgcacaaagcgcagaggcggcgcagaaggcggttagtggtctggtgaatgcgatgccggggggaacaatatgatcgtcaggagtggttttcgaggtaaaggacagccatgacgataatcgccgccataatcagaaatcctatcaggatgtaaaatgcttctgccatggttattcccacaaacgaaacggaataattttgcagcaaaagtgaacagtgagaaccaggaaaaattgctgattttgcgtaaagaggatgcgagtgcatcctctgggcaaagcgagttatcgcttgtgcagatgggattaaagcaggtagtcgccagcagcttctggctggtattcgagttccagcacttcaaggtgggttgcaacgccgcccggaagttcccagtgaatggaatcgccaacgcgcagccccagcagtgcggcacctaccggagccataacggaaagctgagtattgctatcggtcatttttgccggatacaccagcgtgcgcacacgcacttcgccatcgctaagattgcggaatttaacccggctgttcattgtcaccacgtcgtgtggcatctcttctgggctacacatttgggcgcgatccaactctgcgtttaacgcgtcggcgattggcaaaccagcataggcgggttgctccagcagaatatcgatgcgttcggcatccaggtcgttaatgatgatagttggtctggacatttttactccatgtcgtcggtgctgcgagtgtcgcagataaacatacccaaaagaaaaccctcaccgtcaggcggcgagggtttaactcacatgatgatactgactgttgctcactctttgaagtgatttgcgtcacattcagggaattcctcaatgcagcgcattatgtataaatcttaatcgccttggtttatggaagacgaattagcgtgttttgtaaatcagatgattaataacccgctttatcaatcacaaaggttttgccacagttacctgggtgaggttgtggcaagaaactgtttgcagaaagcggagcgttgatggcgtcagctttgatgctgatctgaatttcagtcaaatacgcagggttaccctggcacgttagcttaactgctttcacgttctcttttccccagcttttggcaaaggcggcgtcaaagtcacggcggctcactgttttaccgtaattatccgcaaggaattttccggcttcgctctctttaatttcttgattcaggcgtaccatcgtaccgaagtatgcgtccggatcaaaaccaaagcaggcaccgtgtttggcatattcgtagcgttccaggcaggaacgtccgccagctcctggcatgacttcacttagtttagcggccgtttccagacttaatccggtttccgggctactacacattcggctggcgcgcgcttctggtagattcgggattgggcgagtagcgcaaccgaagcgcatccagcggcgttcatcaacaccacgggcagcaacgcttttaggcaatcctggccacagaccatgtacggtcagaaaatcagctttgttggtcgtttcggtttgcaggcgacattcatctcgttcgttacgatttcgatcgtgttgactctggcaaaatccggtttgccaggagagggccaggacatagcgatcaaaatcgccatactgttttgcctgcaacgctaaggcgttggcagaagagaagggaagcagagaaaccgcgagcaacgcggcgttacgccagaatgctttcataatgggtgtggaactcatacatacactgaatactatctattaaatcataaaaaagcccgccaggtgggcttacctggcgggcgtgatgatttattcagcgtttggcgaacgtattagttccacatggcgagaatcggccagccaaccaacagcaacatagagatgtaaatcaccccgaagattgcgccaagacgccagtaatctttacttttcacatagccacagccgtaaataatcaccccaggaccggttgcatacggcgtcagacagcccatgataccgatagacagcaccagcaggatacacagttgttccattggtacgcccggaatacctttaccgacggccagaataaccggcagcatggttgcggtgtgcgcagacaggctggcaaacaggtagtgtgcaaagtagaacaccagaaccagtacaatcaccgttgcgtttggactgaatccttccaggtgcgtactcatggtaccggcgaaccagtcaataaaaccagaacgagtcaggccgttagccatcacaaccagagttgccaggttgaccagtgtgttccatgcgctgttatagcgggtaatgtctttccaaggcacaacgtgcagggccagcattaggctaactgccagcagaccaaccgcagtagcattaatgacttcactgccaaatacccacaaacctaagctgagcaatacaaggccaatcagtgtccactctctgcgtgtcagcgcacccatggttttcagttcatcacccgcccaggttgccacttcttcactgtgtgtgatttccggtttgtacagcacgtaggaaagccacggcgcaatgataagcaagataaccccaaccggcaggaagcagaggaaccactgcaaccagctaatctggataccggcaattttgctgacgaactccagacccagcacgtttggtgccgcaccggtgacaaacatggagctactcagactggtactaatgaccatcatccacatcaaatagccgccaatacgacgcgcggacggatcgttcgggaaacttttaaacaacggcggcaggtttttaatgaccggaaaaaccgtacccccggtacgcgcggtgttggaaggtgtaaacggtgccagcagaatgtcgataatgacaatcgcataacccaacgtcagcgtgcgtttgcccatgaatttcaccaggaaaagggcaatgcgacgacctaacccggaaacttcataccctaatgcaaaaataaatgcgccaaataccagccataccgtggtgctggaaaaaccagccaggccccatttcagcgcctgtttttgcgcattaaacgctgggtcagctaattctttggcatcaaagagcaggtaattactgccaataacgcaaatagtaaccgcaataaaactgatcgctgttgccggaattggctcgaggatcatgccgacaatcattgccacaaacacagcgaagtaatgccatgcctgcggcggcataccgtcggggacagggataagaaacatgacacccatcaccaccagtggggccaatagtttccatatattatcttttgctaaagacatacgggttctccgaaaattaatatttccaaatttatcaagtgcttaaataattaaatctgtgctaaaaaccaggtaaggatcagtaggtcagcactgccgcctggactgagatttcgttcgatacactccctgtcgaactgccggagataatcgagatcggcgggggttcgaatgccccctttttgcaataatgtttgcgcctcgcgctgtagccagcgcaggcccccctcgccaccgcggcttgcaacgttggtatcgccgttgatcgccatcagtaggagcaaggtatcgagcaatgccagttcaggatctaacccctgatccagcagagtgaggtaatgcggcaaggcgtgattgatcaccagtggataacccgcttcggcttcaccgcgtgcgccggtaaggccaagctgttggtacaaccgttgacctgccgtcagttgactattattggtacgcagttcgcgatcggtcaggccacggcagaaacttgccgccgtagaacaaacggttgttggcgttaccggttggttgagttgaagcaaacggccaattgccgcacatagcagccctaaagaaaaaatgctgcctttatgcgtgtttacgcccgcagtggcgcggaacatatcaccttcgcaagccataccaattgggcgtaatccgtggagtaccgcttctggtgccatttccgcactacaggcaccaaattcaatgaaacggggtagccagccctgaatcgccagcgcgctgcggtggaaatcttccagcgccatatctttgtgcgcaccgcagttaatgcgatccacgaggcctggtttcggactcagattgacttcagtcagcatggcgcgccagcccagcagggcgtactcatcgattaaactcgtcgcaagctttgtggttttagtactcgttgcaggcatgctcatcgttcagcagtgcctccatgttatttagttgacgttgcaggcatcgacatcgttcagcagtgcctccatgcggttgagtaaatcggtcagttgatgggtttttccacgcgcgcagacggctgcgctttgttcgcacaacaggcagcggcgaggcggcagactatagtcgcggcgggagagaatttcgccttcgggcgtcaggacatcgatatcccataaccgcccgagaggatgactatgttcaagctcaatggtggcgagcttgaggtcgcgagccggggcggcaatgctcaacatgccctccggcccgctggcggaaaccagtgcagcctgctcctgaatttgccagccctgttttgcggctaaggcacgcaaggctgtcacgccatgattaaaaattcggcgtgtgacctcgctgtctttaatcggcccaggcgcaaccacggtaaaggagaccagtggaacaggatggcgcttgagccagacgtgttgccgtgcttgcctttcatcccggctgacgagcagctcgggaatacttaccgcatggtggctggcgagttcaggaagcaggtgcatggcttattccttcacctgatgcacaacatcgatcacgctgccatcgcggtaacgcacaacggcaacgacgcggtctgtgaattcaatcggctgtggttcaccggtcagcagacgcgcacgttcgcgcagccactcaatggaaaccactttaatgcccgcttcctgcagacgttctgccagttccggacgtgccgggttaactgcgataccgtggtctgtgaccagaatatcgacactggagcctggggtgatgcaggtcagtacgttatccaccagagtcggaatacgaccgcgtaccagcggcgcgacgatgatggaaagcgcagaggcaatcgcggtatcgcagtgaccaccggaagcaccacgcagtacgccgtcagagccggtcagcacgttaacgttgaactgggtgtcaatttccagcgcgctcagtaccaccacgtcgagacgatcaacgcttgcgcctttgctaccccagttagcgtactggttggcgctgatttcgatgtgattggggttacgggccaggctttgcgcagcatggctgtcaaagctctgcacatccagcagtttgcggatcagacctttttcgtgcaggtcaaccatcgtcgcggtaataccgccaagggcgaagtcggcgcgaatatcgcggctacgcattttgtcttccaggaaacgggttaccgccaggcttgcgccgccggtgccggtttgcatggagaaaccttctttgaagtagccagagttgacaatcacatccgcagcgctacgggcaataagcagttcgcgcgggttagtggtcatacgggtcgcgccagcgccgatttttgcagcatcgccaacgcggtcaactttgacgatcaaatcaacctgatcttgctcaatgcttgccggattatgcggataaggcagcagttcttcggtaagcatcacgacctgttttgcgttgtcggcatcaactattgcatagccgagggagccgcagcaggctttaccggtgtagccgttggcattaccgaattcatcacaggacgggacgccgaggaaagccacgtcgatattcagttcgccgctctgtaccagatgcacacgaccgccgtgagagtggatctgcaccggttctgccagcagaccacgggagatctcttccgccagtggaccacgcaggccggaggtataaatgcgggtaaccacgccctggcgaatgtgttctaccagcggcgcatggcaatcactcagggagctggacgccagggtcaggtttttaaagcccatcttcgcgatgacgtccatcaccatattgacggtcaggtcaccgccacggaaagcgtgatggaaggaaaccgtcatgccgtcctgtaaaccagagcgacgaatcgcttcttccaggttggcgcacagtttgcgatcgcgcgctttttcagcctggtaggtttgctttgggctgttctggaaagcggcaagatcgcattcagcgcgacgattccaggccgctacccgttcttgtcgttgagattgttcaattttctgcgtcattttgattgccttattcttcgcggatgccggaaagttctgcacgggagagcaccagacgggcgcgatcgataaccggaccgtccaccatcttgccgttcagggaaaccacgccgaggccttcgcgagcggcggcttcagcggcttctacgacgcggcgggcgtgatccacttctttctgggtcggtgcgtagaggttgtgcagcagatcaatctgacgcgggttgatcaggcttttgccgtcaaagcccagctgtttgatgtgggcggcttcttgcagaaatccggcttcgttgttagcgtcggaatagacggtatcgaacgcctgaatacccgcagagcgcgcggcctgcaaaatggaacagcgtgcgaacagcagttcagttccttccggggagcgttctgtacgcaggttgcgcacatagtcttctgcaccgagggcgataccgatcaaacgctcggaagcgtgagcgatttccactgcgcgggtaatccccagcggagattcaatcgccgccagcaggccggtgctgccgggttcacgaccacaggctttttcgatacgcaggatctctttttcaatatccagaacatcctgagcggtatcggttttcggcagacgcacaacgtccgcaccaccgcgaacgacggcttccaggtcgttaacaccccattcggaatccagcgcgttgacacgcacaatggtttcaatatcgcgatacagcggatgttgcagcgcgtggtaaaccatgcggcgggcggtgtctttttcacgcaatgctacggagtcttcgaggtcaaacatcagggcatcagccgggtagatgaaggagttgctgaccatcgcggcattggcaccaggcacaaacaacatgctgcggcgggtgcgagttttacgttgttgcaggctagcggaaatcattggcaatcctcccatggcagagccgggataccgctggcgcgtgccagcagggcttccagtcgtgcacgtaaaatgcagtacagtgcgcctttgtcatcgacattcagctgtacgccgcgcacgttgtagcgggcgagaacgtccagaatggtggtgcgaattgcatcgccaaactgtttctcaacgctgctattgatttgcaggtcgatatcctgcgtatcgagtggggcgatgcgtatcatcacatccccagactcaagggtgcctgcaacggcgggctggtttattttcatttttcacctgtttctcatgcgggggtcttttgacgagctgccgcgtcctggcgggagtgctcaagcaggttctgcaaataatgcagcgtgactgcagggaccagcggcgcgatagccgtgagatcgtttttcgccagcagttgacgtacccgggaagcggatatcggcatctcctggtaacgcagccgctcaatttcaaccagttcgatgggcggtgcggagatagtcggcgtttccagccagtagcgcatatcctggttgtactgggcggtaacgcgacaaaagggttcagtaccgacaaagcggtgagttacacccagcgcgggagcgaggtactgacggaaaatcttcagatcaatttcggtgtaacaatggttaatgacgctctgttctttaatgaagtagcaagggaacgtagcgcgggagatgatgtattcggagccacgatgcacagtcaggcgtggaatatcggcggtgccttttaacaccaaatccagccggtcttcataggggaagcgactagaatcttctttgactaaaaacagatgcaaccagtcgcactgtgccgcagcctgttgaatcagataacggtgaccattcgtaaagggattggcgttcatcacaatgcagccaatcttgttccctggatgacgaaattttttcaggctttcggcatagcgtttcagtcgcgtggcgctgttttccatcagcaccatcacgccgggtacgctggtcagcgtggaaaaaccgcactggcggaacagcgcctcgtattcggttttggtataaataaacagatgcgtgctgtgccgctcataggcgaggtttatcaattcagtggctaatgtcagcgccagtccttcaccgcggacggattcactgatagcaacgcatttaataatatttccggcaattccaccgcacgcgataagcttttcatcgcgggttacggtaataaatacttcgactgtggtgtcaacgctcaaatcattttcatgcaggaattgggcgatttccgccatttttttattttcactacgttttacgcgggtgaaaatatcattgccgaacataataaatagtatcctgaaggtgcatgttgttatcgatttgcaacgaatgttgttcaatgttgcaaactgataaccttttattttcacttgggagaaagggggtgatcgaggtatatctttttctcctttcgctatacatcctaaggagtatttcggcgtgaaattttgatttatttcacatagagttagtggttttttatttatttaatgattttaagttttttaattaatgtaattacgaaatgactcgcaggtttaagtgatttaattgatttaatgaataaaatttgccacgatcataattaatatctatgtattttgattcaacattttaattacatccgtcaaagaggctcgggacaacccgcaaggaaaacaatgttgcagcttaacgagaataaacagtttgcatttttccaaagactggcatttccgctgcgtatctttttgctgattctggtgttcagtatatttgtcattgcagccctggcgcaatattttacggccagttttgaggactatttaacgcttcatgtacgcgacatggcaatgaatcaggcgaaaattattgcctccaatgacagtgtcatctctgcggtgaaaacgcgtgactacaaacggctggcgaccatcgctaacaaattacaaagagataccgattttgattatgtggtgattggggaccggcacagcatccgcctttaccatcctaatccggagaaaattggttatcctatgcagttcaccaaacagggcgcgctggagaaaggggagagctacttcattaccgggaaagggagtatggggatggcgatgcgcgccaaaacgccaatctttgatgacgatggaaaagtcatcggcgtggtgagcattggctacctggtgagtaaaatcgatagctggcgggctgagtttttattaccgatggcaggtgtgtttgtcgtgctgttagggattctgatgttgctgagctggttcctggccgcgcatatccgtcggcagatgatgggcatggagccaaagcaaatcgcacgcgtggtccgtcagcaagaggcgctgtttagtagcgtttatgaagggctgattgcggtggatccgcatggttacattaccgccatcaatcgtaacgcaagaaagatgctggggctgagttcccccggacggcaatggttgggtaaacccattgttgaagtggtcaggcccgccgatttctttaccgaacagattgatgaaaaacgtcaggatgtggtggcgaactttaacggtctgagcgttattgccaaccgggaagctattcgtagtggtgatgatttgctgggggccattatcagctttcgtagtaaagacgaaatttccaccctcaatgcgcaactgacgcaaataaaacaatacgttgagagccttcgtacattgcgacacgagcatctcaattggatgagcacgctcaatggtctgttgcagatgaaagagtatgatcgcgtgctggcgatggtgcagggggagtctcaggcccagcaacagcttattgacagcctgcgcgaggcgtttgccgatcgccaggtggcggggctgctttttggtaaagtgcagcgcgcccgggaactggggctaaaaatgatcattgtccccggtagccagcttagccaactgccgccaggactggatagcaccgagtttgcagccattgtgggcaatttacttgataacgccttcgaagccagcctgcgtagcgatgaaggaaacaagatcgttgaattattcctcagcgatgaaggcgatgatgtggtgattgaagtcgccgatcagggctgcggcgttccagagtctctacgagacaaaatatttgagcagggggtcagtacgcgtgctgacgagcccggtgaacatggcattgggttgtacttgattgccagctacgtaacgcgctgcggtggtgttatcactctcgaagataatgatccctgcggtaccttatttagtatctatattccgaaagtgaaacctaatgacagctccattaaccctattgatcgttgaggacgaaacgccgctggcagagatgcatgcggaatatattcgtcacattcccggattcagtcagatattactggcgggaaatctggcgcaggcccgaatgatgatcgagcgttttaagccggggctaatcttgctcgataactatcttcctgacggtagagggattaatttactgcatgaactggtgcaggcgcattatcccggcgacgtggtgtttaccactgcagccagcgatatggaaacggtgtctgaagccgtacgttgtggtgtatttgattatctcattaagcccattgcctatgaacggctggggcaaacgctaacccgtttccgccagcgtaaacatatgctggaaagtattgatagcgccagccagaagcaaattgatgagatgtttaatgcttatgctcgcggtgaacctaaggacgagctaccgaccggcattgaccccttgacgctaaacgcggtgcgaaaactgtttaaagagcctggtgtgcaacatacggcagaaacggtggcgcaggcactgaccatcagccgcaccactgccaggcgttatcttgaatattgcgccagccgccatctgattattgctgaaattgttcacggcaaagttggcagaccacaacgcatataccacagtgggtgacatgataaagccggaggaaacttgcctccggcattactatttacttgcctgtgaccgctgctgccgttcctggcaccatcagctctgtagcaacgataacaatcaccaaaccaacaagcaccggtacgctggtgcgttttacgacttcaaacgggctgatcttcgccatcccggcaaccgcaacgactacgccagaaacggggctaagggtacggccaaggttactcgcctgcagcatcgggatagtcaaatacgccgggttaatgccggaagagtgcgccagtttcgggatcatctcaacaaacgcataaaacggcgcattgccactaccggtcgtgactgccgccagcattgtcagaatcaccaataccagcatcaggatgatactcgcgctaccaaagctggtagcgatagaaatcagactttgaataaagccgatggtgctaagcccctgagcgaataccccagcggcaaccagcagcatcaccacgttagcaaacgcatctgccatcccgcgataagccacttccagaccagagaaaactttctgggtattaaagctgcggaggaactccagaatggaggcaatcagcatacaaatcaccagaatagtgatgatgtgtaattgcggaccccatttaccgtcaaaaatcagtacaccgatgatcggcgtgaacggcaaaatggcataaaacgcaggagcagtggtggtgatttcactgacatctaacatttcatgagagatgtgctcttttttatccagataacgttgccagaagaagtgggcgatcgccatgccgataattgcagcaatactgataggcagcgtcgttttgaaggcgaagtcaatcaggctcatttcggaagcttgcgccgccagcaccacatccccactagtcggtgcgagaataatcgccgccggggaggcacaaatggcagcagctgcgccacgactgataccaacgtttaccatcaccggaaatagggttgccatcagcaaaacacccagaccggttgcggaagagacggccagagacatcagacaggcgacaaaataggcggcaatcatcagcaggtaaggggagttaatatactgcaatggtttactcgccagcttgaccaccatatcattcgcgccgatatgggtcatgtaagcggcaaatccacacagcatcataatcatcatgccgaggtcgccgccgcggctcattagtaatattttaacgtattcaacgatatccgtggcgctgtagcctgtactagcctggctggacggtaacactttgtgccccataatggcactgataatcagcaataacaggccaccgacaaataacacaccagtggcggaataccctttaatgatgtagcgagctacacccacaataaccacaaccccaataaggagctcaatgaatgtcagcataatttttcctgtctccaggccccaaagtaaataataaaaaattcctaaagcttaaggaaaaaatatgcccaataaattggcgatgaatgctgattaaaatcaagaaaaactgccattaagacattgaagttgctgtttttatacatagataacaaaacgcatatttagcggttggcaattatcacataataatgtgtgcaaattgatggtggattgatgcaaatttgttaattgcaatggtgttagctgcggctgtgcgctcaaaaaataatctaatatgagcataggttgacgatatatattatatacttcgttaagatgattgttgtatctcgttaaaaaataaaataatttttccttgattgcattttgtcatcaaaaaagacttggtttttcttttttgactattcccatcgcagaaaacgacgcatcatctttaatcgatgcgcggaaatatttaacttgaacaagcggaaataaatagagcagctattcagattattctttatgttgggtctattaaggttatgttaattgtagctttgctatgctagtagtagatttttgataaatgttttatggtcacaaatgaacgtgagtaaatatgtcgctatcttttcctttgtttttattcagttaatcagcgttggtaaagtttttgctaacgcagatgagtggatgacaacgtttagagaaaatattgcacaaacctggcaacagcctgaacattatgatttatatattcctgccatcacctggcatgcacgtttcgcttacgacaaagaaaaaaccgatcgctataacgagcgaccgtggggtggcggttttggcctgagccgttgggatgaaaaaggaaactggcatggcctgtatgccatggcatttaaggacagctggaacaaatgggaaccgattgccggatacggatgggaaagtacctggcgaccgctggcggatgaaaattttcatttaggtctgggattcaccgctggcgtaacggcacgcgataactggaattacatccctctcccggttctactgccattggcctccgtgggttatggcccagtgacttttcagatgacctacattccgggtacctacaacaatggcaatgtgtactttgcctggatgcgctttcagttttgagacaaatgaagttttagtaacttctttaaaatcaatagctaaaataagtaacatcaaaaataacgcgacttttatcactttttagtaaagttacactggacaaagcgtaccacaattggtgtactggtaaccgacacagcatttgtgtctatttttcatgtaaaggtaattttgatgtctaagattaaaggtaacgttaagtggtttaatgagtccaaaggattcggtttcattactccggaagacggcagcaaagacgtgttcgtacacttctctgcaatccagactaatggttttaaaactcttgctgaaggtcagcgcgtagagttcgaaatcactaacggtgccaaaggcccttctgctgcaaacgtaatcgctctgtaagatacgtcagcaagaattcaaaacccgcttaatcagcgggttttttttggtctttagtgtgcggtactggcgctaaacagccagaatgccagtgcggtcatggcaaaagaccccagaaggttgacgaaaacgttcagtaatgcccagccaaagcggccctcttgtaacaaaaacaccacttctgcgctaaatgtactgaaggttgttagaccgccacaaaatccggtggtgattaatactttccacactggatcaatgttcgtcatcctgctgaaccatgcgaatcctattcctatgatgaatgccccaatcaggtttgctgtcagcgtccccaacggaatcgcctgatgcagtgggttaaatcgcatacttaacagccatctcgccacgcttcccgtaccaccgccaataaaaactgctaaaagaagttgtaacactgcaaaatcctgctatttgatttgtatgagtgataagtgtaacgccgaataatcgtcgttggcgaattttacgactctgacaggaggtggcaatgctggttgccgcaggacagtttgctgttacatctgtgtgggaaaagaacgctgagatttgtgccagcttgatggcgcaggcggcggaaaacgacgcaagcctgtttgccctgccggaagcattgctggcgcgcgatgatcatgatgcagatctaagcgttaaaagtgcacagctgctggaaggcgaattcctcggactttacggcgagaaagtaaacgtaacatgatgacgacaattctgacgattcatgttcctagtacgccggggcgcgcatggaatatgctggtggcacttcaggcaggaaacatcgtcgcccgttatgccaaactgcatctctatgatgcatttgccattcaggaaagtcgccgtgttgatgctggtaatgaaatcgctccgttactggaggtggaagggatgaaggtcggtctgatgacctgttatgacttacgctttccagagctggcgctggcacaggcattacagggagctgaaatcctggtacttcctgccgcctgggttcgcgggccgctcaaagagcatcactggagtacgttgcttgccgctcgtgcgctggataccacctgttatatggtggcggcgggggagtgcgggaacaaaaatatcggtcaaagccggattatagatccctttggcgtcaccattgcggcagcgagtgaaatgcctgcactcattatggcggaagtgacgcccgaacgtgtgcgtcaggtgcgcgcgcaactgcccgtcttaaacaaccgtcgctttgcgccgccgcaattattatgatgtttttttactcggcgcttgattcaccttgttacagattgctattgtgtgcgcgcgtcgaatgaccgttaatattctctggtttttaaggcgcgttctgttgccggttatatgtcaagaaggtatctatgggtgagattagtattaccaaactgctggtagttgcggcgctggtcgttctgctgtttgggactaagaagttacgtacgctgggcggagaccttggagcggccattaaagggttcaagaaggcgatgaatgatgacgatgctgcggcgaaaaaaggcgcagacgttgatcttcaggctgaaaagctctctcataaagagtgacgtggcgagcaggacgctccctcaatatcttgttcgatacaaaaaacccgcttcaaaaagcgggttttttatcagacagatgtaagtaattattacaggattacttaacttccatccctttcgcctgcaaatcggcgtggtaagaagagcggacaaacggaccgcatgcagcatgggtaaagcccatcgccagcgcttcggctttcatttcgtcgaactcatccgggctaacgtaacgttgaaccggcaggtgatggcggcttggctgcaaatattgccccagcgttaacatcgtcacaccatgacggcgcaggtcgcgcattacctcaataatttcttcattggtttcacccagtcccaccatcagaccagacttggtcgggatttccggatgcgcttctttaaagcgttccagcagcttcaggctccagttgtaatctgcaccaggccgtacctgacggtaaatacgcggtacgttttccaggttatggttgaacacatctggtggcgttgcagtcagaatatccagagcacgatccatacgaccgcggaaatccggcaccagagtttcaattttgatttgcgggcttttttcccgaatggcagtaatgcaatccgcaaagtgctgggcaccgccatcgcgcaggtcatcacggtcaacggaggtgataaccacataacgcagcgccatatcggcaatggtctgcgccagtttcactggttcattggcatcaggagctaccgggcgaccgtgggcaacatcacagaacggacaacggcgggtacaaatagcgccgaggatcataaacgttgctgtgccgtggttgaagcattccgccaggttagggcaggaggcttcctcgcagacagaatgcaggccatttttgcgcattgcggctttgatgccctggatacgtgtagagtccgctggaagcttgattttcatccattccggcttgcgcagcagggcttcgcgctctgttgccacgtttttaaccgggataagggccatcttatcggcatcgcggtatttaacaccgcgttccatcacaatgggtttactcatagcgtgcgtgttccagttgcgaattacgaaggaaagcgtttcaattcaatagattgttgtaattatcaactatttttgaattaacgactggcagtatatcattgaaacggacctgaaagcagccaaagcggtcgcgaaaatgtaaaattgttgttggattgtgccattttatcgttctgcgctgtgatctggctgtaacaatactttttcaaaatgcattacggataacatctattactccgtgcaggatgggatcacgcaggctgaatttgttgtagtggatagagaaatctatttgctcctcatttaaggacggaaaaggcagtttttccagcggccagcagcggctaaacaggttataaaaacggctgggaataatcgctaacatgtcactgttggcaaccagtgcagcgattgtcaaaatgttgtagctggtgaaattgatttgccggtccggaaacatttcttgaactctctgccgcagaccgctgaaattttgctcttccggtaacagaagtacatgcgcagcgttgtcgatagtctctctgtcatcttctaaagagagtagtggatttccctcgcggcaaattaacaccatattgtcggtgaacagaacatgatgttgcaccgtacgattggtgcaaaacatgttatcgatgatgagatcggtttgaaactgactgagttggttttccgcgtcgctgatgggcgggttgcgcagtaaaagctgcggatagtgagttttaatcgcccgatagatgacaggaaggaccagtgctccgacgctgggagtggtcgcaatagttatcgttcgttgcttatcatagcttccttcgatatccagcgcgccaagaatggactcaaggccctgactgatatactcatgtagatgcatcgcaaatgcggtaggagtgacaccctggcctttgcgaataaacaatgggtcagggaatataacgcgcagtttctgaatagactgactgattgcgctgggggtcagattaagcactttcgctgcattaacgatccctttatgtacatatacagcttcaaaaatagtcagaaggttaagatcaatatttcgtaaggttgtaaatatttgtggtttaccttcactgctctttctgcttaaacagggttcaatttgattattactatccacgcacttactccaattttattcatggaaaaataatatttaaaaaattacaataatcttatgtctaattggaacggaacgcttttgctcaccataatcaactatttcaataggttaatcaatggggtgagttacggagcaaggcgtggcaccgcatttctgcaagtgataaagaaaatatacaaacgcgaaggagatgtaaagcattagcagatattatgagtaatgacccagtgtaaattgggccattgatgtatggaattaagcggtaatatattcgaagtccggattgtttagtagcgctaaaatattttccagtaaacgtggagcaatattattagtcgtcgcttcgggtttccattgacttattttagccatttccattccggcatacccacaaggattaatacgtaaaaatggactaagatccatattgacgtttaatgccagaccgtggaaactacaaccgcgtcgaatacgtaaacccagactgcaaattttcttttccccaacatagacacctggcgcgtcagcccgaggatgcgcttctatacccagttcagccagggtattcaccactgtttgctcaagcaaggtcaccagttcacgcacaccgagtttacggcgtttcaggttaagcaacacatacatcacctgttgccccggcccgtgataagtcacctgcccaccgcgatcgctctggatcaccggaatatcacccggcattaaaatgtgctccgcttttcctgcctgaccttgggtgaataccggatagtgctcgaccagccagatttcatcaagggtactatcatcgcgggtatcggtgaattcatgcatagcctgggagattggctcgtaaggctgaagaccgagctggcggacaagaattttatcctgatacaaaacggcatctccgtggagaatgagtaaaagtgggggaaaagtatatcacagcgaggagaggggagttacccgaccaggagccgggtaacggagaagcgagttacagaaccatgcggacaatatcgattttgcccagttcttcatacagtgtttcaacctgctcgatatgagtggcgttgatagtgatagatacgctgtggtagttgcctttgctgcttggttttaccgttggggtgtagtcacctggcgcatggcgctgtaccacttcaaccacctgatcaaccagctcaggtaacgcctgccccataactttgtaagtaaaaggagtagggaattcaagcagttcgttaagtttggttttcatgtcagctccggcgtaacgtaattaaatagcaactcccgccagaaggcgggagttttttactgatgcttagtatatggggacggaaattacactttcaagtgtttaatttttaaccaaaccagtgatggaacattaatttaatgtaatcaatgattttgccgaagaagttaccttccgggatttcttgcaacacaaccagcgggcgttgctcgatcgttttgccatcaagctggaagttgatagttccgacgacctgattcttttgcagcggcgcatgcaattcactgctgttcagcacatagctggctttcagatctttcatgcgaccacgcggaatggtcaggtacacgtctttatcaacccctaagctagcgcgatcagaatcaccaaaccaaaccggttcagaggcgaactctttacctactttcagtgggttaacggtttcaaagaaacggaagccccaggttagcagttttttactttcggcttcacggcctttaaaagtacgtccgcccattaccgcagaaatcaagcgcatctggccttcagtcgcagaagcaacaaggttgtaacctgctttgtcagtgtgtccggttttgatgccgtcgacattcaggctgttatcccataacaggccgttacggttcagctggcgaataccgttaaacgtaaattctttttctttatagatgctgtattcattcggtacgtcacggatcaatgcctggccgatcagcgccatatctcgcgcggagctgtactgaccatcagcatccagaccatgtaccgtctggaagtgggtatttttcaggcccagtgcgttaacgtagctgttcatcaagccaacaaaagcgtcctggctaccagcggcaaaatcggccatggcgacacaagcatcgttaccgctttgcaggttaataccgcggatcagctgagaaaccggaacctgcatgcccggtttgaggaacatcaggctagaacctttaaacaccgggttaccggtggcccatgcgtcgttgccgatagtgactaaatcagtttctttaaatttaccggctttcattgcctggccgataacgtaactggtcatcattttggtcaggctggcaggatcgcggcggacatctgcgttctgttcggcgagcactttgccggagttatagtcaatcaggatgtaggactccgcatcgatctgcggtacacccgggatcatagttttgatattcaggtcatcggcatgtgcagcagagataaaggctgtgcaaagagccgtggtgagcgccaggcgcttcatgatacgagcggaaaaaatggtattcatggtctgaactacgacatccgtgatggaattaaaaaagtgccctactatagcaaatgcactaccggcaggcatctgactttccgcgtgactttgttaacgtcatttacagaaattgacacatcagatgcctgctttacgttactgcgcggtagtaataaaactctgtaattgggcttcggtttgcaaacgttgctgcaaggtactggcttcggctttgctggcgaatgggccaagctggatccgccagaccgcgccattttgagttacgcgaccggggacgccgaacttctgtcccagttgctgttggtactgttgcgcacgagcctgatcgcttacggccccgacttgcaccataaagttgccgctggcgctttggctgacggcttgcggtgtcaccattgcagggctggttgcaggcgttgtgctcggagctgtaacaacgggctgtggcgcaggcgtcggttcgctgccttccagtacaccaggcgctaaggtcgttggtgcgccgaggaaaccgctactggttaccggcgcgccggtcggatcttcgctttttagcgtgctattactgaccggaagaatgtcaccctgcgggccagacacactacttgttcccgcgccaccgcttaaatcgggaggtgcaggcagggcgtaagtctgtttggcgactgtggtacaagccataccaggaccagaaaggctaccatcctgggcaacaataatcggatcgatacgaactttggtgttgttactcgtgttaagacggtcagctgccgcgcgagaaagactaataacgcggtcgttgccgtaagggccgcgatcattaatgcgcaccacgatcattcgcccgttagccaggttagtgattctggcgtagctggggatcggaagcgttggatgggctgccgtcagctgtgtcggatcgaatgcttcgccagaggccgtcaggttactgccgggttcggcatcatagattgccgccagtcccgcctggctaaatcgagacggatcctgcacgattttgtagcttttaccgtcgcgctggtaatcctgatttgccgtcgcgttcagtggttcgaaacgcgggtccgccccgctaatttcaactatagggccgttacataccgcaggctgcggtacacttaccgtctgttgctgaccatcatcgcttgtacatgccgcgagcattcctgccgcgatgcagatcccgagccactgcttacgcattgcgcacctcttacacgcttttgctcaacattttcctgtgggtgtggatactcattacaatcccgaacccagccatcagcacaattagcgcgcttcctccataactgaccagtgggagcggaacccctacaaccggcagaataccgcttaccataccaatatttacgaagacataaacgaataatatcagcattaagccgccagccatgacgcgaccaaaggtggtttgcgctctggcggctatccacagcccgcgcatgatcagcagaatgtagagagcgagcagaatcagaatgcccactaatcccagctcttccgccagtaccgcgaagataaagtcagtatggcgttcggggagaaattcaagctgactctgagtgccgtgcagccagcctttgccgcgtaatccgccggagccaatagcaattttagactgaataatgtgatagcccgcgccgagtgggtcactttccgggtccaggagcatcattacgcgctggcgctggtaatcatgcatcaggaagaaccacagaatcggaatgaacgccgctaccagcactactgcgacgccaatcagacgccagctaaggccagagaggaacagtacaaacagaccggaaagcgcaacgaggatacttgttcccaggtcaggctgtgcagccaccagcagcgtgggcataaatatcagcaccagcgcgatgccagtgttcttcaagcttggcgggcaaacgtcgcggttgataaagcgcgcaaccatcagtggtacggctattttggcaatttcgctcggctgaaaacgaacaataccgaggtccagccagcgttgagcacctttagagatggcaccgaaagcatctaccgccaccagcaaaataatacagatgatatagagatagggggcccagccttcataaacgcgtggaggaatttgcgccatcaccaccatgatgaccagacccatcgcgatttggccgattttacgctccatcatgccaatatcctgaccgctggcgctccagataaccagggcgctgtaaaccagcaatgccagtaagatcagcagcattgtgggatcgagatggactttatcccagaatgtttttttattcggattatccgtcatgattaatggtcctccgctgcggcaaccgctggattttccgcaggcagatcggtgttgttatcacccagcataatgtggtcgaggatctggcgcatcagtgtaccaaccgccggacccgcaccaccgttctccagaatcatggcgacagccacttgcggattgttgtatggcgcaaaggcggtcatcagtttgtggtcacgtaaacgctcggcaattttgtgcgcattataggtttcgttcgctttcagaccgaagacctgagcggtaccggatttcgccgcaattttgtacggtgcgctagcaaagtatttatgcgccgtaccgttagggcggttagcaacaccgtacataccgtctttcgccagctcccagtaaccggaatgaatatcgccgacgggcggttcatgcggctgtacccatggcacctgtttgccgtcttcggcggtgctcatcagcaaatgaggaaccttcacgataccgtcattaatcaggatcatcagtgccttactcatctggattggggtcgctgtccagtaaccctgaccgataccaaccggaatggtgtcaccctgataccacggttttttaaagcgtttctgtttccattcgcgggtaggcatgttgccggaacgttcttccgccaggtcgataccggtgtaatgaccataaccgaatttacccatccattcggagaggcgatcgatccccatatcgtaggccacctgatagaagaaggtatccgcagattcttccaggcttcttgtgacattcagacgcccgtggccccattttttccagtcacgataacgtttttcgctacctggcagttgccaccagcctgggtcaaacagcgtcgtattgcgcgtgatcaccccggcgctcaatgcgctaaccgccacatagggtttaactgtagacgcgggaggataaaccccctgtgtggcgcggttcaccagcggtgtattcggatcgttcaacaaggcggaataatctttgctggagataccgtcaacaaacaagtttgggtcataactaggcgtggaaaccagcgccagcaccccacctgtacgcggatcggtgactaccacagctgcgcggctacccgccagcagcgtttcaatatattgctggagtttgagatccagcgtcaggtaaatatcgtgtccggcttgcggtggtacttcttttaactggcgaataacacgcccacggttgttaacttcaacctcttcataaccggtctgaccgtgcagcacatcttcatagtaacgctcaatgcccagcttaccgatatcatgcgttgccgcatagttggccagtttgccgtcattattcaggcgttcgacgtctttatcgttgattttgctcacatagccgatgacgtgggtcaacgcgctaccgtaaggatagtaacgacgtttatagcctttaacttcgacacccggaaaacggtactgattgacggcaaagcgagctacttgtacttcggtcaggttagttttcaccggaatagaggtgaaacggtgactacgtgcgcgctcttttcggaatgcagcaatatcgtcatcggtcagatctaccacgctgcgcaaagcgtccagcgtttgctgcacgttatcgactttctccggcatcatttctatctggtagatagtgcggttgagggccagagggataccgttacgatcgtagataatgccgcggctgggcgcgataggcaccagcttaatgcggttttcattagagcgggtctggtagtcggtaaagcgaacaatttgcagattatacaggttggcgataagcacgccggtcagcagcaaaatccccaaaaaggcgaccagcgcccggcgcacaaacagcgcggactctgccgtatagtcgcgaaaagagttctgtagtttcatccgctgcgttttctactcaaagctcccttatcactcacggtgataaggatggttggtggtgatgctccacgcccggtacagactctctgcgaccagcacgcgaaccagcggatgggggagggtaagcgcgctcaggctccagctctgctcagccgccgctttacaggcagggctcaacccttcaggcccgccaatcagtagactgacgtcgcgaccatccagcttccagcgttccagctcagcggctaactgcggcgtatcccagggcttgcctggaatatcgagggtgacaatgcggtttttgcctgcggccgccaacatctgctcaccctctttgtcgagtatgcgcttgatgtccgcattcttgccgcgttttccggccggaatttcaatcagctcgaagggcatatctttcggaaaacgacgcaggtactcggtaaaaccggtttgtacccagtccggcattttcgttcccacggcgacaagttgcagcttcacgcattaactccagagtttttccagttcatacaggcgacggctctcttcctgcatgacatggacaatcacatcgcccaaatccacgacaatccagtcggcgctgttttcaccttctacgccgagcggtaacaggcccgctgcgcgagactcctgcacaacgtggtcagcaatggacataacatgacggctggacgtacccgtacagatgatcatgcagtcggtgatgctggatttgccctgaacgtctaaggcgatgatgtcctgacctttgaggtcatcaattttgtcgataacaaaatcctggagtgctttaccctgcaagttttccccctgggtgaatcaaatagataaaaatggtctgtcagtatacctgaaccagaggcgatttcgggacaattgtcgccgaatcggctttcgaaagtgggctatcatcccaccccgcgccgcagattgcatcgccatttttgtaaaacaatttctacaaagtcgtgtctggcggaaaaagtctggctgcggagaatatcagcctgcccgggtctgtcaatggtcgttgcggcttacccgtaaaaaaacagaaaagtcatgcattctcgaccccgatggcacggctattgaggacgcgtagcgtcgcgaatttttggttgatatcaatggcgctccaacacccctggtcaacgcgaaaatgccacatagcttcggcaggcatgccaattaaacgggcgattaacagactcagtacaccctgatggctgacgactaaaatattctgatagtgctgaaattcactaagccttgcgataaagcgttccacacgttggctaaatgcctgaaatccttcaccgttcgtggggattgcatgctgccagtcattgcaccacgcgctatagttttcggcatcttcttgcatgaggtcgcgatgatgtcgcatctcccagtcgccaaaaaacatttcgttgagttcaggtatgatttgcacggggagctggcggtcactgagaaccagtcgcgcggtatgctgtgcccgttccagttcactgcataaaaccagatcaaaggaaacaccatgtagcagcgtatgcagattttgcgcttgctcaataccgcgcgcggtcaggggggtgggcgcatgaccgctgtaaagaccatcgatattcgcttgcgtttcaccatgacgaattaaccacagtcgcatcatgccctccgtaacgacaggtatcagcgatacaagccttgttggttaatgtaagtcagtaccggttccggcaataaatcctcacaactttcaccgttttgcaaacgttcgcggatgatggtcgcgctgatgttaaaccacggcgtttcagccagataaattttaccggcaggctgaaggtgaagatcttccgggttatgtgtcaaatgatcttccagccattgctggtattgcggttgcgccatttcaagtgggtaacctggacgccgacagacgatcaaatgtgcattgtcgagtatcgtttcgtattcgtaccaggtcggaaaggtcagcagactatcctgaccaataataaacgccagcggcacgtccggtccttgttcctgccgccactctttcagtgtttgcgcagtgtaagagggggcattgcgctttagctcgcgttcatcaagagtaaataatggcttgtcggcaatcgccagttcaagcatgtgtttacgctgcacgctgttcgcttccggctggggacgatgcggaggaacattattagggatgattgtgacccgcgtcagaccaatcaaattcgccagcgtttccacgggttttagatgaccatagtgcaccggatcaaaggtgccgccaaacagagcctgtaaagatttcatatcaaccgtcgataaatacgtccgccaggggtttatggcacaacagaagagataacccttccagctctgcccacacactctgaccgtaatcttgtttgagggtgagttccgttcgtgtcaggagttgcacggcctgacgtaactgcgtctgacttaagcgatttaacgcctcgcccatcatgccccggcggttctgccatacccgatgcttatcaaacaacgcacgcagtggcgtatgggcagactggcgtttcaggttaaccagtaacaacagttcacgttgtaatgtgcgcaacaaaataaccggttcgctgccttccagacgcagttgctgaagaatatgcaatgcgcgcttactttttcccatcaacaaagcatcaacccaatgaaaaggggtgaaatgcgcggcatcattcaccgcctgttcaacgcgcggtaatgtcaatttgccgtctggccagagcaggcttaaacgctccagtgcctgagccagcgccagcaggttaccttcataacagtagcagagcacctgatttgccgcgtcatccagttctaagttgagctgttttgcgcgcgcagcaacccagcggggaagctgagcctgctccggtgtctgacaggtcacctgcacgctgcgattcgcaagcgcagtaaaccaggcggcattttcttgcgctttgcttaatttattaccgcggacgatcaacagcaggtcgtcatgcagaagtccggtgagtgtgagaagttgctcattgatcgccgcattcggtccgttttctggtaacaacagcaatagcgtttgtcgactggcaaacagactcatagcctggcataagctaaagatcgcattccagtcagtgttgggatcaatggaaaaagtgtggtgttcttcgaatccttgtgccgcagctacctgacgaacagcgtcctggctttcctgcaataacagaggatcgttaccaagtaaaagatacgccgcgcgcagcccttcattgagctgcgcgcggagttgttccgggtacaaccgaatcatcagttacccagcgtggtggagacgcgtgcaggcgttgccggagtatccgttgtggtgctcgtctgttcttcgtcggaacgaatatccgcagcacggatgcttggcagcttacgaatcagctgttcggcagcacggtcgtacatctcttttacgatcatgtcttgttcgttatctttcgctaacgccatttgcgggttatcgaagaagctacggaagactttggcgctaatcgggtagatatcacggccggggatcaacacggtcgcattaaccgtcatgatcatctgatactctgctgtttgaccgttacggaatacgcttgcggtatctttcgcgatgctcactttacccaaacgcaaggatggaacgtccttacgcgtggtttctttatcaagcaactcgacaccattcagacgtaactggttacgcaccgcacggcttaatggcccgttcggatcgccactgtccaggatcatgaccttcatagtggaaggaacctgcgtggtatcacgcagatgccagccacacccggcggtgattaacaccgccagagataacaacaatgttgccagatatcgcacgcttcctcccgcgcttagccaacgaccagattgaggagtttacctggtacgtaaatcactttacgtacagtaacgccatcaagatattttgctaccagatgttcctggccagcacgttcgcgaacctgttcttccgttgcgtccaccggaacggtgattttggcacggactttaccgttaacctgcaccacgaccagcgtggagtcttccaccatcgctttttcgtcagcaaccggccacggcgcgttgtcgatatcgccttcgcctttcagttcctgccacagcgtgaagcagatgtgcggggtgaacgggttaagcatacggacaacggccagcagtgcttcctgcatcagagcgcgatcctgctcgccatcggttggtgctttcgccagtttgttcatcagctccataatcgccgcaattgcggtgttgaaggtctgacgacggccgatatcatcggtcactttagcgatcgttttatgcacatcgcgacgcagcgctttctgattttcagtcagcgcatcaacgttcagtgccgcaacatcaccttttgctgtgtgctcgtaaaccagtttccagacacgtttcaggaagcggttagccccttccacaccggattcctgccattcgagagtcatatcagccggagaagcaaacatcataaacagacgaacggtgtccgcgccgtaacgttcaaccatcacctgcgggtcgataccgttgttcttgctcttggacattttgctcatgccggtataaaccagttcatggcctgccgcatctttcgctttcacgatacggcctttctcgtcacgttcaacgatagcatcaaccggggaaacccagttacgttcgccgttttcgccaacatagtagaaggcatctgccagcaccataccctgacacagcaactgtttcgctggttcgtcagagttcaccatgcctgcatcacgcatcagtttgtggaagaagcggaagtagagcaggtgcataatggcgtgttcaataccaccaatgtagatatccaccggcagccagtagttagccgcttcggaatccagcataccttctttgtactgcgggcaagtgtagcgcgcatagtaccaggaggactccataaaggtgtcgaaagtgtcggtttcacgcagtgctggcataccgttaacggtagttttcgcccactccggatctgctttaatcgggctggtaatgccgtccattaccacatcttccggcaggatcaccggcagctggtcgtccggggtcggcattacggtaccgtcttccagcgtcaccatcggaatcggcgcgccccagtaacgctgacgggaaacaccccagtcgcgcaggcggtagttcactttacgctcgccaacgcccatcgcagtcagtttatcggcgatggcgttgaaggccgcttcatggtcaagaccgttgaactcgccagagttgaacagcacgcctttttcagtcagggcttgctgagaaagatctggctcagagccgtcagctgccaggataaccggtttgatgttcaggccgtatttagaggcaaactcgtagtcgcgctggtcgtgccccggtaccgccataactgcgcccgtgccgtactccatcaatacgaagtttgctgcccaaacgggaatttcttcgcccgttaatgggtgaaccgctttaaagccagtatcgacgccttttttctccatcgtcgccatttcagcttcggcaactttggtgttacggcattcgtcaataaaggccgccagttcaggattattttccgccgctttctgcgccagcggatgacccgcagctaccgccaggtaggtacaacccataaaggtgtccgggcgggtagtgtaaacggtcagcgtgttgtcatagtcgttaacgttgaaggtgatctccacgccttcggaacgaccgatccagttacgctgcatggttttaacggtgtctggccagtgatccagtttatccagatcgttgagcagctcgtcagcgtaagcagtgattttgataaaccactgcgggatctctttacgttcaactttggtatcgcagcgccagcagcagccgtcgataacttgttcgttcgccagtacggtctggtcgttcgggcaccagttgaccgcagaagtcttcttatataccaggccttttttatacagctcggtgaagaatttctgttcccaacggtagtattccggcgtacaggttgccagctcgcggctccagtcataaccaaagcccagcattttgagctggtttttcatatacgcgatgttgtcgtacgtccacggtgccggagcggtgttgtttttcaccgccgcgccttccgcaggcagaccaaacgcgtcccagccgatcggctgcaggacgtttttgcccagcatacgctggtagcgggcgatcacgtcaccgatggtgtagttacgtacgtggcccatgtgtagtcgaccagaaggatagggaagcatagacaggcagtaatacttctctttgctctcgtcttcggttacttcaaatgtgcgcttctcatcccaatgaagctgtactttggattctatctcttccgggcggtattgctcttgcatggcagccagtggtcctgttttcaatacggctacaaatgtagcgttgaggtggtttttcagatccgcatagcatagcccaaacgtccgcgtcaaaacagcctttcgcgcactcgacgttgaaatgatgcccggattattcatacattaatttacagagtttgtgggcgtattagcaaagcaaggaacaaagaacgtctattattatagtcagttaacgacccgggagatgaaacgatgaacaaggttgctcaatattaccgtgaactggttgcgagtctgagcgaacgcctgcgcaatggcgaacgtgatatcgacgcactggtggaacaggcgcgcgagcgcgtaataaaaacaggggagttaacgcgaaccgaggtcgatgagctgacgcgagctgtcagacgtgacctggaagagttcgccatgagctatgaagagagcctgaaagaagaatctgacagcgtctttatgcgggtgattaaagaaagcttgtggcaggagctggcagacatcaccgataaaacgcagcttgaatggcgcgaagttttccaggacctcaatcatcatggggtttatcacagcggagaagtggtcgggctgggaaatctggtctgcgagaaatgtcacttccatctcccgatctacacaccggaagtgctgacgctatgcccgaaatgtggtcatgaccagttccagagacgcccgtttgagccgtaatagtctgatttcgcacagcaataaagagaatatgggccgaatgaaattccccggcccttgtttttatctttacagtaaatcttcagtctcacgaatttcctgactgacatctctggttccggaactctgaactttacgatacaggtcgagagcctgtcggagatcgacaggtcttccttctccgtagtgatacataatggccaggttataccaggcagtggcgtcattgcattcagcggctttcgtaaaccattcaaaggcagcctgataatctttctcaacgccttgtccgtgtttatacatataaccgatgttgacgtaagcgccgacgctcccctgagcggcagccttcagataccagtacatcgcttgcttatagtcctggtccaccccttcgccagcgttataatcccatgcaatttgaaactgggcgtgccgattaccctgctgtgcgcttttcaaataccagaatgcggcgagtgtcttgttttgagcaacgccttttccgtcttcataaagatcggccagattgttttgcgcgtcactatggccttgtaatgcagcttgtttgtaccagaaaaatgccagcgcatagtcttttgcgactccgttgccatttctgtacatccacccaagattattttgcgcataagacattccgctctccgcggctatctgataccagacaaccgcttctttataattgggggcttctccacgatccagtgtccagccaagggcgttggaagcgaaagtatggccttgtagggcagcttttttcagccagaagatggcttgctcattatctttatgacggcttttatcctcggtatacttttgccctaaggaatactgtgcttcacaatgaccttgctcagcggccagcttcagccagtaaaaggctttttcgtcgtccggagaatcaattgcgctatcgcgattataataaaacccaacaatatattgagcctcgcaatcgcctttttcagcacgttcgataatctcatctatacttaaattatcgcagcaactactcgtgaaaatcattatcatttccttatggttgcagataaaacatattatatttttatgtgttccatttttgcgtaagccttattttatgcgtattatgtcgcgtcagaaaagtataaataaacgagcctcgcaatgcggctaatattcatttaatgaatatttaaggataaattatatggacatggagagccaaaaaatattgtttgcactttccactccgatggaaatacgcaatgaatgctgtttacctagccatagtagtcccaaaatgtatttaggtacatgcttttttgacctttcttccagttggggaattgatgaccgtgatgacctgctgcgcacaattcaccgaatgatcgataacggtcatgccgctcggttggcagggttttatcaccgctggtttcgttatagcccatgtgaatggcgtgactatcttgctgaactaaatgagcaaggtcaggcttatgcgcaatttgtcgccagcaccgccgaatgctgtggcgaagggggaatcaaagcctgggattatgtccggatgggttttttaagccgaatgggcgtacttaataactggttgagcgaagaagaaagtctatggatccagagccgcattcatctacgggctctacgttattatagtaactggcggcaatactttgccggttatacctttggtcggcaatattggcagtctcccgaagatgatcatctgcctttattacgcgaattcttagcgcgtaaagaatacgacgattccggcaatgatatgttttatcaattatttgccagtgatgatgcgtattaccctaccttgtcctggcaaccattggcttactattctgcatgcccggaaacgcttaaggatatgagcgacctatgaaaaattgctggaagatcctcgatatagaggaaacgactgacgtcgatattatccgccgcgcttatctggcgctgttaccgtcctttcatccagaaaccgatccgcagggttttaaacaacttcgtcaggcgtatgaggaggcgctacggattgcgcagagccctgctaaatctgtttggcaaccagaagaatatgaggtagcagaacatgaaattctgctcgcctttcgtgcgttacttgcctctgatagtgaacgttttctgccctccgcctggcagcgattcattcagcaattaaattattgcagcatggaggagattgatgaattacgctggagcctgtgcacaatcgccatgaacactgcccatttatccttcgagtgcgtggtgttattagcagaaagattgcggtggttacaggaggaaaataccggggaaatagacgaagaagaactggaatcctttttatatgccattgcgaaggggaatgtttttaacttccagaccattctgcatctgcccgttgccgtgcaaaatgacaccatcgatttttaccaaatgttcgctcggatttggagtagccatccacaatggctgacattgtatttagcgcaacatcgcgcagtgattatccccgatgatgcaaaactgcacagaaatttactccgctggtatagcgcaggtcgcctggatatccccgaacttctggattacgcccagagttggcgggaaactgaacctgataatgaagatgcgccttattatgaatacgcgcaacgcgtctattgtggagaaggcgaaagcctgttggcagaactttgtgactactggcgcgagtatccctccacccaggcggatgctttaatgttgcaatggtgccgtcagcatcgggtcgattattacccattactggtgatgatgattgaagcgcgtgatctggttaacgatcagggaaaaccgctactttatgtccccggcgacagcgcccgtacgcgttttcatttatacgaaatactcagcgatgaaaaactctctgcgctggggcgtagtctggtcgagatggttttgcacaaaggacgtaagccgcggatcagtctcacgcgtgatacagaacataccttatggccattatatctagttgccaaacaattagtgcaggcctgccaacctacagaagaaagtttaatgccgattgtgagccgccttgatgcagaaaatcgttgtccactggaagcattaattattcgtcgattattaattcaggcggcgaattttaccgagaagcaaactgttgaaccggagccgcaaccgcagccaatgcccgttgacgatggtgggccaggctgtctgggcatcattaaaattattttctatatttttatctttgctggtttgatagggaaaatactccatctgttcgggtgacagtcgacgttaatgtgcgggaagcccggcaagtaatctttccgcatttttgtaatgttgtttggcggtcagttttaaccatttttgagattcataatggttaacattaataccactgccatttctgtagatcaaacctaaagtatattgagcatgagcatacccttgttcagctgcttccttataccagagaattgctttacgggtgtcgggtttgacccccagacctttgaggtagatccaccccagtttactttgcgcgcgtggattttcctgttccgcactttgctcataccagtatctcgcctgtgtataatccagtggtttaccgtcgctaccatgaagataaaattctccaaggcgatattggctcgtactgtgaccatgaatcgcggaaagctccgtggctgccgtggtgaatggaagactgcccggactgcttaaataatcaaaggcataattcaccatggctttatcacgcaacgtcgttttcttgggttggctaatacaggtaattgctgcaactataaaaattgcgaatatatacattaattttttattcatgtgtgaatgcttcgattttctttttattttgaaagcgtcaagtttatactcatcaataataaaaaagtagtcagttaatgcacttaagggattattaacaaatgaataaggaagaacaatatcttctttttgcgctttctgcgcccatggaaatacttaatcagggttgcaaacccgcgcatgacagcccaaaaatgtatactgggataaaagaattcgagctcagtagttcctggggaataaataatcgtgatgatttaattcagactatttatcagatgactgatgatggtcatgccaatgatttagctggcttatatctgacatggcatcgctcttcccctgaagagtggaaagcattaattgctggtggcagcgagagagggttgatttatacccaattcgttgcccaaaccgctatgtgctgtggggaagggggaatcaaagcctgggattatgttcgaatggggtttctgagtcgggtcggtgtgctcaacaagtggctgacggaagaagagagtttatggctgcaaagccgcgtctatgtacgagctcaccattactatcacagctggatgcactatttttccgcctatagcttaggacgtctctactggcaatcttctcagtgcgaagacaacactagcctacgcgaggcgctaaccctgtacaaatacgatagcgccgggagtcgtatgttcgaagagctggcagcgggaagcgatcgtttctatgccacgcttccctggcagccattaactgtccagtctgaatgcccggtaacgcttaaggatgtgagcgacctatgaaaacatgttggcaaatcctcgaaattgaaagcacgacgcaaatagacattatccgccaggcttatcttgctcgcttaccgttgtgtcatcccgaaaccgatccgcaagggtttaaagcattacgccaggcctatgaagaggccctgcgactggcggtaaatcctgtcgaggaagcagatgatgaagaaaaagatgctgccgctgaacatgaaatactacgtgcattcaggacattactggatagtgaaagtgatcgttttcagccttccgcctggcagaaatttattcagcaattaaatacctggaacatggaggatgtcgatcaattacgctggccgctgtgtgcaatcgccatagaagcgcgatatcttagtttaaattgtgcttctttgctggcagagcgtttgaactggcatagttttaatgacagcgaaggaatggatgaggaagaaagggaggcttttcttgaggccattcaggctggtgattgtttcgatttccttagccttctggaatatcccattgcgttgcagaaccagactgttgagtattacttcgcgctggaacgttgctgccgttaccatcctgactatgtcactgcgtttttggcgatggaaggtccgtggttaattcctgatgatgcaaagttacatcgcaaactgttgcgctggtacagcagcgtgcaaacaggtatggcggaactcattcctgtcgctcaacagtggcaaacggaagaaccagaaagcgaagatgcccggtattacttgtgtgcacaacgtttgtactgcggcgagggggaaagcctgcttgccgatctctgcgcgtactgggaaagttacccatctacacaagctgataatttgttgttgcagtggagcaagcgtcattgcccggattatttcgcgttattagtgatggttatcgaagcgcggagcatggtagatgcgcaaggtcaaccgctgaaatatgttcctggtgagagcgcccggacgcggctgttatgggcggagattttacatagcggaaaattaagcccgttaggtcaaagctttattgagagcttattcttcaagcgcaaagcatgggcgtggtggaaaagcagagtcggtagcgagacagagcaagatagtccgttcctggatttgtatcgggtagcggaacaggtagtacttgaagcgtttccgaaacaagagatgctggcccgtcttaatacaaggctggaaggcggagatgctcatccattagaggccattgtcacccggatgcttttgacgaaagtgaaactcgagccggaggatgaagatgtcgatgagccaacacctgaaaatcatgaagaaaaaaatgatgagggtgaaaaaccacagagcattaccagcattatcaaaatcagtttaacggtgctggtgataggttatgctctcggcaaaatcgcgatgttgtttagctgacgatgtgttttttgcgccgatgccggatgcagcgtttacgccgcatccggcagccgtgtttatgggatctcaatggctaaataatcgctcgcccgccgccgaacttcatccacgcgggccatatcgttactctgcaacgccgcatcaaaatcggtgatcacccggccgatctcttctcgctcgtcacccagcgcccgcgcccacaactcttccagtttggctttaaaggtgcgattgatgagcatatcgcgcggataaattttcaatgcggataaccgcgtccgactctcttcaatctgctgcgcgctcaatgttaccgggctgtggttaatcactctggacttaacgctgccgtcttccagaagcacgtcaacttcaagcaacccgttgatatcataactaaagcgaatatcaatgctctgataagccccggttttcttcaacggcacatcgaaggattccaccagaatgttgtttttaactttgtggttttctccctgatagacgttaaccgtaatactatcctgttccgggtgcatggtactataagtttctacacggctcacgggcacagtggtgtttcgttcaataatcgggctgaaaatgccggaaacgccctggcggttaacttcaacgcccaagctgtaagggcaaatatcagtgaggattacctcttcaatatcttcactgcgtaagcggcaggcggcctggattgctgcgcccagcgcgacaatggtgctcggatcgtaactttgatacggtaatttgccaaacagacgcacggcgattcgctgcaccagcggcatttgactcgcgccgccaaccagcaccagactgtcgatttgactcggcttcagacgcgcatcgcgcaacgcctgttcaatcggcactcgcaagcgattgagcagcggcaaccacaaatcttccagttcgttctcgtaaaattcgcattcccgcgtttcttcctgatactgccagcgaatgtgcaatgggctttgattgctacattttgccgcttccacacaggcgtacaaggctgccagttcactctcgttaagcgtggtcctggcgacatccgcgcgttttaaaacctcatcgaccagcatatgggtaaaatcttcgccaccaagaaagttgtcgccagcggaggcgtgaacttcaatcaccggcgtggcgtactcaagcaccgtaacgtcaaacgtgccgccaccgagatcaaacaccaggctacgggtattttgttgggtatgcaggccatacgccatcgcagctgctgtgggttcattaattaagcgtaccgcatttaacccggctaactccgctgctaaacgggtatgcttgcgttgttcatcgctgaaataagccggaacggagatcaccacatctttaatcggacgttgcagaaattcttcggcatcttcttttaaactgcgtaataccaaagaggacagttctggcgcgttaaatgtgtcgctgcctaaccgccagttggtattactgcccattgcacgtttaaataacgctgccgttttatccggatggctagtacgccgacttacagccggttttccgactaaaatatgattattttcatccatgctaattatggatggtgttaaatattcaccgaacttatttggaattaattgcgcggcaccgtctttccagacggcaattaaactattggtagtaccgagatcgataccaatggcgagttctgcattatccattgcatttatatcttgaaagaaaaagagataaacagattaagaccacccaggtaacgcgtggtgatcttaatcaatgacgtgtgttaagcgtaaaatttcagacgatcagccagtaaatcaacaaagccctgacgatcaacatcgaccattacggtggcattcggtttattgcctgtcagataataataatcaacaaccgtcataccctgggtatatttcccctgtgtttccacgccaacccagcgctcaacagaggtaaataactccggtttcaacagccaggcgatggtgcatgggtcatgcagtggtgcgccgacaaagccccatttttcgtctttatgatattcgaggaagaaatccagcagttcggcaacaatggtactaacagggttaccaatcgcgcggaaacgctcggtgtcttcaacgtggatttgtgctttatgagtaacatccagaccggccatcaccaccgggatcccactctggaagacaatttctgccgcttccgggtcaacgtaaatattaaattcagccgcaggcgtccagttacccagccccatagcgccacccataatcacgatacgggcaattttgctatgcagttccggatggctattgagcagcaaggcaacgttagtttgcggtccggtagacacaatggtgacaggttccgcactttcacgcagcgttttcgccatcagctctaccgccgtacagttttgcggtgcgaatgtcggttccggtaatgccgggccgtcgagaccgctttcgccgtgcacattgtccgcgataatcaactcacgcattaacggttttaccgcgccgcctgctaccggaatatcggtgcgattaagcaaggtcagcatacgcagaacattgcgtaaggttttttctggtgtctggtttccggcggaagacgtaattgctttgacatcaagctctggactggcgagggcgagaactattgcgatagcgtcgtcatgacctgggtcgcaatctaacagaattggcagtgccattgttgctccttgttgtgtgcttctttgcgacaagggtaacgccaggatgtaacagatacgaggggcgaaacgataaagcgtgagatggcgcgcaattgggtatgcgcgccagagtgattaatgcaggattttcgcgaggaagtcttttgcgcggtcgcttttcggatcatcgaagaaagcgtctttcgggctgtcttcgacaattttaccctcgtccataaagatcacccgattcgccactttacgggcaaagcccatttcgtgggtcaccaccatcatggtcattccttcgttcgccagttccaccatcacgtccagtacttcgttgatcatctccggatccagcgcgcttgtcggttcgtcaaacagcatcgcaataggatccatacacaacgcgcgagcgattgccacacgctgctgctgaccgccggaaagctgcgccggaaacttattggcgtgagcagaaagcccgacacgctccagcagtttcagggctttttcacgagccggcgctttatcgcgtttaagcactttcacctgcgccagggtcaggttttcgataatgctcagatgagggaacagctcgaaatgctggaataccatcccgacgcgggaacgcagctttgccagatcggttttcttgtcgttaaccacgataccatcgacggtgatttcaccttgctgcaccggttcgaggccgttgacggttttaatcagcgtacttttgccggaaccagacgggccgcaaaccaccaccacttcgccttttttcacttcggtactgcagtcggtcagcacctgaaagtgaccataccatttactaacatttttcagggtaatcattatgctgtccttcttttcaagtagctgaccaacaagctcgcgctaagactaataacgaaataaacaaatccggcaaacaggatcatctcaacctgcgtaccatcacgctcaccaatggtactggcggtacggaagaaatcggccagggataacacatacaccagactggtatcctggaacagtacgatgccctgagtgagcagcagcggcaccatcgcgcggaacgcctgcggcagaataatcagtttcatgctctgccagtgagtcattcccaacgccagcgcggcgctgctttgaccacgagaaatactttgaataccagcacggataatctcactatagtaggccgcttcaaacatgctaaacgccaccatcgcgctaattaaacggatatcattttttgggcttaatcccagcacgttttgcagaaaacccggcacgatcaggtaaaaccacagcaaaaccataactaaaggaatgctgcggaatacgttaacgtaggctttggcaaaccacgccacgggcgcaaagctggataaacgcatcaccgccagcatcgtgccccacaaaataccaatcactaccgccgtgacggtgattttcagggtgatcaccagcccgtcgagcagatatggcagggaagggacaatggaactccagtcaaactcgtacattatttgccccccatgttgccaggcaggcgaactttacgttcaaccagcgtcatcaccagcatgataaaagcgttaatcaacacatacgccagcgtaatggcggtaaagctctcccaggcatgggcactgtaatcgagcaatttacccgcctgcgccgccatatccaccagaccgatagtgctggcgatggcggagtttttcaccaggttcatcatctcactggtcatcggcgggacgataacgcgataagcattaggcagcagtacgtatcgataagcctgcggtagcgtcaggcccatcgccagcgcggcatttttttgccctcgcggcaggctctgaatcgcggcgcgtacctgttcgcaaacacgggcggcggtaaacagccccaggcagagcatggaactaaggaaaaactgaatattgggatccagctcggccttaaaccacatgccgattttctccggcagcagctccgggatcaccagataccaggtaaagaattgcacaatcaacggcacgttgcggaacagttcgacatacaacgtacccagaccagagagaaaacggtttggaacggtacgtaaaatgccgaaaaaactaccgacgaggaaagcgataatccaggcgcagatgctcaaagcgatcgtcacctgaaaaccactccagatccaaccaagataggtggtgttgccgaacggggcttgttgtaaaaaaataccccagttccagtctatagacataaatctactccagaaaaaagagggtagcagcgttaactgctaccctcgaagattgttacccagcgtattgcggttttcaggcccgatggggaacgaccatcaggcgtatagtctgtccgtgctacgtaacaatcgagagggctggaatttccgcccctggttcttgtaattagttcagtgccttgtcattcggttctttgaacagtgctttcatttcgtcactcagttcgaaattcatgttcaggtttttcggcggaattggatttttgaaccacttatcaaaccatttttccgcttcaccggaggtctgcacctgagcgatggtgtcatccatcagctttttgaactgcggatcatctttacgcaacatacaaccgtaggcctcctgagactgcggcttgccgacgatttcccagttgtctggtttcttcgctttcgcacgttcaccggccagcagagcgtcatccatcataaaggcaacggcacgaccgctttccagggtgcggaaagagtcaccgtgatctttggcgctgatgatgcgcatattcattttttgctcttcattcagtttgttgagcaaaacttcagaggtagtgccggaagtgacgactacggctttgtctttcaggttggcaaaatctttgatatcgccaccctttttggtcaacaggcgcgtaccgaccacgaaaatagtgtcagagaaagccgcctgtttttggcgttcgacgttgttggtggtagaaccacattcaaaatcgaaagtgccgttttgcagcagtggaatacggttttgactggtaatcggaatcagttttacctgcaagtccggtttgttgagtttctttttcactgcttcaacaatggcgttggagtaatcctggctgtaacccaccactttttgctgattgtcgtaataagagaaaggcacactagattcacggtgaccgacgacaatcacaccgtttttggcgattttgtccagagtactgcccgctgccggggcggcgtcatctgcctgtgccagtcctgcggaaagcgccagggcgaggattgctgtggcaggtttacgtaattgcatatccaactcctttatcttctgcgttaagaacgcatggatacccgttgtgagtgtttgtgttgttatcgtctgcaactttattgtgcagtgttgtgcctgttagggaaggtgccttaggtaacatttagtttggctaaatgtaaagatattgctgttttattgtttgtttttgcgagatgcgccgcaccattccgaagcaaaattcttaaaatgcactcttttagtgctaccgctggattactgtggtgcaactaggttgtactgatgctgtttcagggtttgccttgtataacaaagcaatagatgtgccaaagttggataggagaatattgttatccggataatgcactgatgccgcatccggtgagcgtgccgaaatatgggatgtattccggcacgataagaagggattatttacgtcgctgacgcagactcatcaacacagcagcaaaaccaaacaatgccgtcagcacccacagcggccagttgccggtacgtgcgtatggtgtgagtccggtggtcggcgtcacgttagtggttaacacctcgcgggtgaactgcgggatcatcgcctgaatctcaccctgcgggccaatcaccgccgtaatgccgttgttggtgctgcgcaacagtgggcgcgccagctccagcgcacgcattcgcgccatctggaagtgttgccatggaccaatagatttaccaaaccacgcatcgttggagatagtcagcagatagtcggtatccgggcggaagttatcgcgcacttgctcgccgagaatgatctcgtagcaaatagccgcagtaagctcaataccatttgcgctcagcggcggctggatatatggcccacggctgaagctgctcatcggcagatcaaagaacggtgctaacggacgcagaatgctctccagcgggacaaactcgccaaacggcaccagatggtttttgttatagcgatcggcactttcgtagctgtacggcgcacctttacccagcgtgatgatggtgttgtaggtatcgtagcggttctgcttattgagacgcgcgtcgacaatcccggttaccaggctgctacctttatcacgcaactcaccgtccagtgctttgaggaacggttgctgattaatttccagatcggttatcgcgctctccggccagataatcaagctacttttgcccatcagcggtgccgttgcgttgtagtaaatcttcagcgtattaagaagctggccttcgtcccatttcaggctttgcggaatatcgccctgaaccatgctaacctgaatggttttctccggttgtggggtaaaccactggatgtaacgcagcgggaagggaagggcaaacagcacgacggccaccaccagcggacgccagttgcgtttgaccaacgccagtgccagcaggccactaaccatcatcagcaggaagttaatggcttccacgcccattatcggtgccagcccttttaacgggccatcaatctggctatagccgaactgtaaccacgggaagccggtcagtacccaaccgcgcagaaactcggtcacttgccagagggcaggggcggcaatcgctacgcgcagccaggtggttttcggccacagacggctcagcacgccagcaaacagtccggtatacaggctcaaatacgccgccagcagcaccaccaggaagatgttaaccgggccaggcattccgccaaaggtcgcgatgctgacatagacccagttaataccgctgccaaagaggccaaatccccagcaaaagccaatagcggcagactggagtggacggcggttaaaggtcaacgcctgaagccccatcaggctaataatcgccgcaggccagacgtcgtaaggagagaaggccagcgttccgcaggcaccgaataataacgccagcagcaggcgaatgcgctggcgttcaattaaactggcaaaagccatgtagttatctatccagtttcggttttattcatccagcttcggctggggactgtcatccgggattttgacatgaacctgaataatacgccgactgtcggccatcgccactttgaactggtaaccgtcgatgtcgatagtttcgccacgcgccggaagatgcccaaatgcctgcatcaccagaccaccgatagtgtcgacttcttcatcgctaaagtgggtgccgaacgcttcgttgaagtcttcaatggaagccagtgcgcgtacggtccaggtatgacgactcagctgacggaagtcgatatcatcttcttcgtcatactcgtcttcaatctcaccaacaatcagttccaggatgtcttcaatggtcaccagaccggaaaccccaccgaattcgtcaataacgatcgccatgtggtaacgctgagagcgaaactctttcagcatccggtctacgcgcttactttcaggaacgacaaccgcctgacgtaacactttgtccatgctgaaggcttcagcatcgctgcgcataaacggcagcaagtctttcgccatcagaatcccttcaatgtgatctttgtcttcgctaatcaccgggaaacgactgtgggcggactcgatgatgacatcaagacattcgtccagcgtctggttgcgtttcagggtaatcatctgggagcgggggatcatgatgtcgcgaacgcgttggtctgcgatgtccatcaccccttcgagcatatcgcgcgtatcttcgtcgataaggtcgttctgcccggaatcacggatcagcgccagcagttcgtcacggtttttcggttcaccgtggaaaagttggctgagtaacagggagaaaaatcccttcttgttgcttatcgtgtcactactgtgactattgtcgtcgctcatggcgtcgtatgggttctcatgttagttaatcaaaacgccgtcgttaatcaccaacggcggggacgtctgccagtcaaatgcctggcaaattattctttctcggcaatgtacggatcctcatagcccagagcaagcataatctctgtttcgagggcttccatttcttctgcttcgtcatcttcgatgtgatcgtaacctaacaaatgcagactgccgtgcaccaccatatgcgcccagtgcgcctccagtggtttgccttgctcctgagcttccttctcaaccacctgacggcagataaccagatcgcccagtaggctcatttccatgccaggcggcacttcaaacgggaaggagagcacgttggtcggcttatccttaccgcgataggtcagattcagactgtggctttcggcggtatcgaccacgcgaatcgtcacttcgctttcttcctgaaactgcgggatcaccgcattcagccatgtctgaaactggctctcttccggtaacccggaattatcttcacatgccagttgtaaatcgaggatcacctgactcatttttgttcctgttcttcgcgcttgcgttctgctgccagcgccgcttttcgtttttgttcggcttcttcccaggcttcataggcgttaacgatacgcgccaccacagggtgacgaaccacgtcttcgctgtggaagaagttaaagctgatctcttcgacatcggccagcacttcgatggcgtgacgtaagccacttttagtattacgcggcaggtcgatctgtgtgacgtcgccggtgataaccgctttactgttaaaaccgatacgggtcaggaacatcttcatctgttcgatggtggtgttctggctctcatcgagaatgataaacgcgtcgttcagcgtacgaccacgcatataggccagcggtgcgacttcaataacgttgcgctcaatcagtttctcgactttctcaaagcccagcatttcaaacagcgcgtcgtacagcgggcgcagatacgggtctactttctggcttaaatcgccaggcaggaagcccagtttctcaccggcttctactgccggacgagtcagcagaatacggcgaatttcctgacgctccagggcatcaactgccgcagccactgccaggtaggttttacccgtacccgccgggccaacgccgaaggtaatgtcatggtcgagaatattggcgatgtactgcgcctggtttggcgtgcgcggcttaattacgccgcgtttggttttgatattgaccgctttgccgtactccggcacgctctccgcgctttgctccagtacccgcgcttctttaatcgcaaggtggatctgttccggttcgatatcctgaatctgaccgcgcatcggggcagtatcgacatacaggctacgcagaatgtctgccgcagcggtgacgcaaatcggacggccggtcagtttaaagtggttatcgcggcgattgatctcgatgccgagacggcgttcgagctgcttgatgttgtcatcaaacgggccgcacaggctcaacagacgcgcattgtctgctggctccagggtgatttcgcgagtgtctatgttcaaaccgttcctcttatctgtatgccgccggaagctgaacattcaccggcctataaggaaattattcacgccacaggaaaaaggcgcaagcattgcaataaagatggggataaagagagaaaaaacaaggcccaccggaacggcaggcctgagaattacggctgataataacccacgccaaggtcgttttctttgcgggtacgggcaatcacactttccggtgtttctgccacgcgcagacccatttcatcttcagtacgcaccactttaccgcgcagagagttcgggtagacgtcggtaatttctacatcgacgaatttaccgatcatatccggcgtgccttcgaagttgaccacgcggttattttccgtacgcccggaaagctccatgatgctcttacggcttgtaccttctaccagaatacgctgggtggtgccgagcatccggcggctccacgccatcgcttgctgattaatgcgctcttgcagaatatacagacgctgcttcttctcttcttccggaacatcatcaaccatatcggcggctggtgtacccggacgtgcagagaagataaagctgtagctcatgtcgaaattgacgtcggcaatcagcttcatcgttttctcgaagtcttcggtggtttcgccagggaagccaacgatgaaatcagaactgatctgaatatctggacgcgccgcacgcagtttacggatgatcgctttgtactccagcgccgtatgggtacggcccatcaggttcagaatgcgatcggaaccgctctgtaccggcagatgcaggaagctcaccagctccggcgtgtcgcgatacacttcgatgatatcgtcggtgaattcgatcggatggctggtggtaaagcgaatacgatcgatcccgtcgatcgcagcaaccagacgcagcagatcggcaaagcttccggtggtgccgtcgtagttttcaccacgccaggcgttcacgttctgaccgagcaggttgacttcacgcacgccctgagccgcaagctgggcaatctcaaacagaatatcgtcggacggacggcttacctcttcaccacgggtgtaaggcaccacgcagtaggtgcaatatttattgcagccttccatgatggagacaaacgcggtcggcccttcggcgcgcggttccggtagacggtcaaacttctcgatttccgggaagctgatatctacaaccgggctgcggtcgccacgcacggagttgatcatctccggcagacggtgcagcgtttgcggcccaaaaataatatcgacatagtgggcgcgctggcgaatgtgctcgccttcttggcttgccacgcagccaccgacgccgataatcaggtctggattcttctcttttaacagtttccagcgacccaactgatggaagactttttcctgagccttctcgcggatactgcaggtgttcagcagcagcacatccgcttcttccgccacgtcggtcagttgatagccgtgggtggcatccagcagatcggccatcttgctactatcgtactcgttcatctgacagccccaggttttaatatggagttttttggtcatcgacttgctcttgcgaaatagtagccaggaatgcagggcgcatagtgtaatgctttgctgccgttgtgaccagtatgagcgttatcagcccttaggggtaaaaatcctgtaaacttaaagcatattgctaacaggatgattgaccatgacaaatcaaccaacggaaattgccattgtcggcggaggaatggtcggcggcgcactggcgctggggctggcacagcacggatttgcggtaacggtgatcgagcacgcagaaccagcgccgtttgtcgctgatagccaaccggacgtgcggatcagcgcgatcagcgcggctagcgtaagtttgcttaaagggttaggggtctgggatgcagtacaggctatgcgttgccatccttaccgcagactggaaacgtgggagtgggaaacggcgcatgtggtgtttgacgccgctgaacttaagctaccgctgcttggctatatggtggaaaacactgtcctgcaacaggcgttgtggcaggcgctggaagcgcatccgaaagtaacgttacgtgtgccaggcagcctgattgcgctgcatcgccatgatgatcttcaggagctggagctgaaaggcggtgaagtgattcgcgcgaagctggtgattggtgccgacggcgcaaatagccaggtgcggcagatggcgggaattggcgttcatgcatggcagtatgcgcagagctgcatgttgattagcgtccagtgcgagaacgatcccggcgacagcacctggcagcaatttactccggacggaccgcgtgcgtttctgccgttgtttgataactgggcaagcctggtgtggtatgactctccggcgcgtattcgccagttgcagaatatgaatatggcacagctccaggcggaaatcgcgaagcatttcccgagccgtctgggttacgttacaccgcttgccgctggtgcgtttccgctgacgcgtcgccatgcgttgcagtacgtgcagccagggcttgcgctggtgggcgatgccgcgcataccatccatccgctggcggggcagggagtgaatcttggttatcgtgatgtcgatgccctgattgatgttctggtcaacgcccgcagctacggcgaagcgtgggccagttatcctgtcctcaagcgttaccagatgcggcgcatggcggataacttcattatgcaaagcggtatggatctgttttatgccggattcagcaataatctgccaccactgcgttttatgcgtaatctcgggttaatggcggcggagcgtgctggcgtgttgaaacgtcaggcgctgaaatatgcgttagggttgtaaccttacaacattgccggatgcgtgccaaccgtaggtcggataagacgcggcagcgtcgcatccgacattgaaggataagacgtgtcaacatcgcattcgacattgaatgaacgcagaaaagcaaaaagctcgccgaagcgagcttttttaatgtggctggggtacgaggattcgaacctcggaatgccggaatcagaatccggtgccttaccgcttggcgataccccaactgggtgcacttacaaggtaagcgtcttgaataaattggctggggtacgaggattcgaacctcggaatgccggaatcagaatccggtgccttaccgcttggcgataccccaacaaattggttttgaatttgccgaacatattcgatacattcagaatttggtggctacgacgggattcgaacctgtgaccccatcattatgagtgatgtgctctaaccaactgagctacgtagccagattgtttcttcgatggctggggtacctggattcgaaccagggaatgccggtatcaaaaaccggtgccttaccgcttggcgataccccaataaccgggcggtgaaccgcttactcgaagaagatggctggggtacctggattcgaaccagggaatgccggtatcaaaaaccggtgccttaccgcttggcgataccccatccgtacaacgctttctggtgaatggtgcgggaggcgagacttgaactcgcacaccttgcggcgccagaacctaaatctggtgcgtctaccaatttcgccactcccgcaaaaaaagatggtggctacgacgggattcgaacctgtgaccccatcattatgagtgatgtgctctaaccaactgagctacgtagccatcttttttttcgcgataccttatcggcgttgcggggcgcattatgcgtatagagccttgcagcgtcaacctctttttcaaggaaaattgctcgaaagtgactgtttggttaggttgcgaacagcgtggcgctatattcgtcaattattgtttactttgtgttttttcccaccctacagccattcttttgtcatacaggatgaaattcggaatttaacaatagtggtgggaaattaatctatgaaatactggcctacagtgatgagttgtcaaacagtgatgtggcaaacccggaacatttccttactgcatatcagaatcaacaagcacctcaataactgaaacagccccggatttcaccggggctgtttcgcatttcttacttatacgcgctctggtgaacaccaaccgcgcgaccagacggatcgtccattttcttgaacgcttcatcccattcgatcgctttagcggaagaacaagcgacggaaggaccgcccggcacgcactcagcggcgctcggaagcgggaatagttcttcaaagatctcccgatacaagtacgcttctttagaggttggcgtgttgtacgggaagcggaagcgggcagtttccagttgctgatcagaaacctgctgcgcagccacttctttcagggtgtcgatccaactgtaaccgacgccatcggagaactgctctttctgccgccaggccacgcttgcaggcagatacgcttcaaaacattcacgcaggatgtgtttttccattttgccgttaccgcacattttatcctgtgggttaatacgcatcgccacatcaaggaattttttgtcgaggaacggaacgcgtgcttccacgccccaggcactcatcgctttgttggcacgcgcgcagtcatacatatgcagggccagcagtttacgcaccgtctcttcatgcagttctttggcattcggtgctttgtggaagtaaagataaccgccgaacacttcatcagaaccttcaccggacagcaccattttaatgcccatcgccttgatcttacggctcattaaatacatcggtgtactagcgcgaatagtggtcacatcataagtttcgatgtggtaaatcacgtcgcggatggcatccagaccttcctgtacagtgaagtgaatttcgtgatgcaccgtgcccagatggtttgccacttcctgggctgctttcagatccggactacccggcagacctacagcaaaggagtgtaactgcggccaccaggcttcagagcgttcctgatcttccacgcgacgggctgcgtatttcttggtgatagcggaaataatactggaatccagaccaccagaaagcagcacaccgtaaggcacatcagacatcagatggcttttaacactatcttccagtgcctgacgcagctcgtttttgtcggtcacgttatctttcaccgcatcgtagtcgaaccagtcgcgatgatagtaagaacggatttcgccgtcctggctccacaaatagctccccgccgggaactctttaatcgtgcggcaaactggcaccagcgctttcatttcactggccacatacagctgaccgtgttcgtcataccccatatacagtgggatgatccccagatggtcgcgaccaatcaggtaggcatctttttcgctgtcgtacagtgcaaaggcaaacatgccctgcaagtcgtcgagaaattccggccctttttcctgatacagcgcgaggatcacttcacagtcagacccggtctggaactggtaacgatcgccatattcggcgcgcaatgcctggtggttgtagatttcaccgtttaccgccagtacgtgggttttttgttggttgtagagaggttgcgcccccgcgttaacgtcaacaatactcagacgttcgtgggcgagaatggcgttatcgctggcataaataccggaccagtccgggccacgatgacgcatcaggcgactcagctcgagggctttcttacgcagctcaactgcgtctgttttgatatcgaatacgccaaaaatactacacataaccttctccgttaacctggtatttgttgcttgttgtgtttgcttgtttaaaaaaatgccgcaaagcagcactgtgcgcaagcgatttggcggtgaaaaaataaaaaacgtaatggtgattgtcgattggtgaaaaaaggtctggtgtgaggatatatttattgatgaatcgataatttttagcgggttttattgaatgtttatattttacgggggccaaattgctgacaaagtgcgatttgttcatgccggatgcggcgtgaacgccttatccggcctacaaaagcatgaaaattcaatatattgcaggagctgcgtaggcctgataagcgtagcgcatcaggcagtttggcgtttgtcatcagagccaaccacgtccgcagacgtggttgctattcagataacgtcgatttcagcgacactcgggtaaatccagctggggcggaaaggcatactgtcgatatcgtcgaggctgctaacaccagaaagcaccagaatcgtctccagacctgcctggaagccggccagaatatcggtacgcaggttatcgccgacaatcaccgtttcttcgctatgcgcctgcattttgtttaatgctgcgcggatgatccacgggctgggcttaccaacatagaacggtttgcgcccggagattttctcaatccctgcacacaacgcgccacaagcgggataaaaaccgcgcccgtgggtgtccggattggtggcgataaaacgtgcaccgttagcgacgaaataggctgctttatgcatcatgtcccagttgtaggaacgcgtttcgccaacaatcacgaaatcagggttcacatcggtaatagtgaaaccggctttgtacagttcatgaatcagtgcgccttcgcccaccacatacgctttcttgccttcctggcgacgcaggaaatcggcagtcgccatcgcagaggtataaaacacgctgtcaggtacatcgacacctgcggtggcaaagcggttcgccagatcttgcccagtctggctaggatagttggtcagcaacaccagcggcaggcctttatccataatcccgtgcaaaaattccgctgcacccggtacggcgacgttatcgtgcatcagcacgccgtcgatatcgcaaattacatttttaatggtcatggactacccagaatattgacaacaataagcgccactataaaagcacattaattttccagcaaatgctggagcaaaataccgttgagcatggcgcgttttaccagcgcaaaagcgccgattgcgctgcggtgatccagctcagaacgtaccaccggcagattagtgcgaaacgccttcagcgcctgggtattaatgcagctttcaatagcagggagcagcactttatcggcttcggtgatttcaccggcaataacaattttttgcggattaaataagttgatagcaatggcgatggttttacccagatgacgaccgacatactcaattacttcgctcgccagactatcgcctttgttcgcggctttgcagatagttttgatggtgcagtcgtccagcggcacgcggctctggtagccctgctttaacagattcaacacccgttgttcaatggcagcgttggcagcgatagtttccaggcagccaaagttgccgcagtggcagcgttcacccagcggttcgacctgaatatggccaatttcaccgacgttgccgttgcggccaataaaaatgcgcccgttagagataatcccggccccggttccgcgatggacacgcaccagaatggagtcttcgcaatcctgacttgcaccgaagtagtgctccgccagcgccagactacggatatcgtgaccaacgaaacaggtcactttaaaacgttcttccagagcttctaccagcccccagttttctacctgaatatgcggcatgtaatgaattttgccgctgtccgggtcaacaagccctggcaggatcacgctaatcgcgatcagctcgcgcagtttgcgctggtagctatcaataaactgagcaatggcattcaacagggcatgttccagcgtttgctgggtacgttccggcagcgggtaatgttcttctgccagcactttgctgctgagatcaaacagagtgatggtggcgtcatgacgaccaagccgtacgccgattgcgtggaaattgcgggtttcggtgacgatggagatagcgcggcggcccccggtggaggcctgctgatcaacttctttgatcagcccgcgttcgataagctgacgcgtaattttggttacgctggcgggggcaagctggctttgctcggcaatctgaatccggctgattggcccgtactggtcaatcaggcgataaaccgccgcgctgttaagctgttttacgagatcaacattacctatctgagcttgtccgcctggtgtcatactttctcttattgagttacgacctcgttaccgttaacgatggtcttggtgattttaaaatcaggtgtgaatgcagtcaggttggctactttacctgcggcgagtgtgccgagacgtttctcaacgccaatcgcacgcgccggatagagcgtcgccatacgtagcacttcatccagtgcgataccgcaatgttcgaccagattacgcacgccttcaatcatggttaaggaactaccgcttaacgtaccgttctcatccacacaaagtccgttacggtagtatattgttttacccgcaaaaatgaactgttcaatgttggcacctgctggcgcggtggcgtcagtaaccagacacagtttgtcgcctttcagacgtttagcgttgcgaatgttggcgtaatcaacatgcaggccatcagcaataataccgcaataaatgtcagcttcgtcgaggatcgcgcccgccaggccaggttcacgaccggtaatatacggcatcgcgttgtacagatgggtggcaaaggtaatccccgcgcggaaaccggcttttgcttctttcaacgtcgcgttggagtgaccggcagaaaccacaatcccggcatttgccagtttgctgatgacttccgcaggaaccatttccggtgccagggtcactttggtaatgacgtcggcgttttcacacaggaaatcgaccagcgcggcatcaggcttacgcacaaaattcggattatggatgcctttttttaccagattcagccacggaccttccagatgcagacctaacgcctgattcggatgttttgccaggtactcgcgcataacgcgcacgccctgtttcatcagctcatcgctggtggtgataagcgtcggcagatagttagtacagccacttttctcattggctttctgcatgatttccagcgtttccacgctgaccgcttcagcggtgtcgttaaactgtacgccgccgcagccgtttaactgcacatcgataaaaccgggggagagaatggccccgttcagactacgttgttcgatctctggcggcagttccgctaccggacagacgcttttaatcaggccatcagcgataacaaccgcgtggtcatcaagaaattcgtggccggtaaagatccggccctgggttaatgcatacattctgacccccgattttaaaaaatattgccctgagcaaggagccagggcagggataacaattacagacctttgatattttctgcttctaattcattgaaatatcttaaagtcttaactttcagctccatggtggaaggttcatcgcacaccatgatcgctttcggatgcagttgcagacagctgatggtccacatatggttcacgcaaccttcaacggcggcctgcagcgccagtgctttctggctacccagcaccagaatcatcacttcttcggcatccagcagtgtaccaacaccgacagtcagggcatattttggcacctgattaacatcgttatcaaagaaacgagagtttgcgacgcgagtgtcatgagtcagggttttgatacgagtacgagaagccagagaagacgccggttcgttaaatgcaatatgaccgtcgttacctacaccgcccataaacagatgaatttttccgtaagaacggattttttcttcatactggcggcactcggcgtcgatatccggggcgttgccgttgagaaggttgatgttttctgctggaatatcaacgtgatcgaagaaattacggtgcataaagctgtagtagctttccggatgctctttcggcagaccgacatattcgtccatgttgaaggtgacaacgtgcttaaagctgacctggcctgctttatgcatttcgactaacgctttataggtggtcatcggcgtgccgccagtcggcaggcccagtacaaacggacgatcggcagtcggtttgaacgcattgatacgattgacgatatggcgagcagcccatttgccgacctgttcagcggtagtcagggggatcagtctcattattcacctcaataagtaaaatgtaagccgttggcggattaggcatctttaagcgtaacctggatttgcgcagacaggcgtcaatccgacctgattttttgaatgataaaataagttttctggtttagccagtaaaagggagtgataataacgatatttggtgacaaaactcacaaaagacacgcgtttaatttgcgatacgaattaaattttcacacactctgtagcagatgatctaacaatctgattacagaacatcggcagtacaatttgcagcaaaataaaaatacggcttgaaacgagccaaatagggttctcgtagggggaataagatgaatattttaggttttttccagcgactcggtagggcgttacagctccctatcgcggtgctgccggtggcggcactgttgctgcgattcggtcagccagatttacttaacgttgcgtttattgcccaggcgggcggtgcgatttttgataacctcgcattaatcttcgccatcggtgtggcatccagctggagcaaagacagcgctggtgcggcggcgctggcgggtgcggtaggttactttgtgttaaccaaagcgatggtgaccatcaacccagaaattaacatgggtgtactggcgggtatcattaccggtctggttggtggcgcagcctataaccgttggtccgatattaaactgccggacttcctgagcttcttcggcggcaaacgctttgtgccgattgccaccggattcttctgcctggtgctggcggccatttttggttacgtctggccgccggtacagcacgctatccatgcaggcggcgagtggatcgtttctgcgggcgcgctgggttccggtatctttggtttcatcaaccgtctgctgatcccaaccggtctgcatcaggtactgaacaccatcgcctggttccagattggtgaattcaccaacgcggcgggtacggttttccacggtgacattaaccgcttctatgccggtgacggcaccgcggggatgttcatgtccggcttcttcccgatcatgatgttcggtctgccgggtgcggcgctggcgatgtacttcgcagcaccgaaagagcgtcgtccgatggttggcggtatgctgctttctgttgctgttactgcgttcctgaccggtgtgactgagccgctggaattcctgttcatgttccttgctccgctgctgtacctcctgcacgcactgctgaccggtatcagcctgtttgtggcaacgctgctgggtatccacgcgggcttctctttctctgcgggggctatcgactacgcgttgatgtataacctgccggccgccagccagaacgtctggatgctgctggtgatgggcgttatcttcttcgctatctacttcgtggtgttcagtttggttatccgcatgttcaacctgaaaacgccgggtcgtgaagataaagaagacgagatcgttactgaagaagccaacagcaacactgaagaaggtctgactcaactggcaaccaactatattgctgcggttggcggcactgacaacctgaaagcgattgacgcctgtatcacccgtctgcgccttacagtggctgactctgcccgcgttaacgatacgatgtgtaaacgtctgggtgcttctggggtagtgaaactgaacaaacagactattcaggtgattgttggcgcgaaagcagaatccatcggcgatgcgatgaagaaagtcgttgcccgtggtccggtagccgctgcgagtgctgaagcaactccggcaactgccgcgcctgtagcaaaaccgcaggctgtaccaaacgcggtatctatcgcggagctggtaagcccgattaccggtgatgtcgtggcactggatcaggttcctgacgaagcattcgccagcaaagcggtgggtgacggtgtggcggtgaaaccgacagataaaatcgtcgtaagtccagccgcagggacaatcgtgaaaatcttcaacaccaaccacgcgttctgcctggaaaccgaaaaaggcgcggagatcgtcgtccatatgggtatcgacaccgtagcgctggaaggtaaaggctttaaacgtctggtggaagagggtgcgcaggtaagcgcagggcaaccgattctggaaatggatctggattacctgaacgctaacgcccgcagcatgattagcccggtggtttgcagcaatatcgacgatttcagtggcttgatcattaaagctcagggccatattgtggcgggtcaaacaccgctgtatgaaatcaaaaagtaatctgctttatgcctgatgcgacgcttgagcgtcgcatccaacaatgacaagcggtggagatcttctctgccgctttttttttcatcaatcatccccataatccttgttagattatcaattttaaaaaactaacagttgtcagcctgtcccgcttataagatcatacgccgttatacgttgtttacgctttgaggaatccacgatgagtgaggcagaagcccgcccgactaactttatccgtcagatcatcgatgaagatctggccagtggtaagcacaccacagtacacacccgtttcccgccggagccgaatggctatctgcatattggccatgcgaaatctatctgcctgaacttcgggatcgcccaggactataaaggccagtgcaacctgcgtttcgacgacactaacccggtaaaagaagatatcgagtatgttgagagcatcaaaaacgacgtagagtggttaggttttcactggtctggtaacgtccgttactcctccgattattttgatcagctccacgcctatgcgatcgaactgatcaataaaggcctggcgtacgttgatgaactgacgccggaacagatccgcgaataccgcggcaccctgacgcaaccgggtaaaaacagcccgtaccgcgaccgcagcgttgaagagaacctggcgctgttcgaaaaaatgcgtgccggtggttttgaagaaggtaaagcctgcctgcgtgcgaaaatcgacatggctagtccgtttatcgtgatgcgcgatccggtgctgtaccgtattaaatttgctgaacaccaccagactggcaacaagtggtgcatctacccgatgtacgacttcacccactgcatcagcgatgccctggaaggtattacgcactctctgtgtacgcttgagttccaggacaaccgtcgtctgtacgactgggtactggacaacatcacgattcctgttcacccgcgccagtatgagttcagccgcctgaatctggaatacaccgtgatgtccaagcgtaagttgaacctgctggtgaccgacaagcacgttgaaggctgggatgacccgcgtatgccgaccatttccggtctgcgtcgtcgtggttacactgcggcttctattcgtgagttctgcaaacgcatcggcgtgaccaagcaggacaacaccattgagatggcgagcctggaatcctgcatccgtgaagatctcaacgaaaatgcgccgcgcgcaatggcggttatcgatccggtgaaactggttatcgaaaactatcagggcgaaggcgaaatggttaccatgccgaaccatccgaacaaaccggaaatgggcagccgtcaggtgccgtttagcggtgagatttggattgatcgcgccgatttccgcgaagaagctaacaagcagtacaaacgtctggtgctgggtaaagaagtgcgtctgcgtaatgcttatgtgattaaggcagaacgcgtcgagaaagatgccgaaggtaatatcaccaccatcttctgtacttatgacgccgataccttaagcaaagatccggcagatggtcgtaaagtcaaaggtgttattcactgggtgagcgcggcacatgcgctgccggttgaaatccgtttgtatgaccgtctgttcagcgtgcctaacccaggtgctgcggatgatttcctgagcgtgattaacccggaaagcctggtgatcaaacagggctttgctgaaccgagcctgaaagatgcggttgcgggtaaagcattccagtttgagcgtgaaggttacttctgcctcgatagccgccattctacggcggaaaaaccggtatttaaccgcaccgttgggctgcgtgatacctgggcgaaagtaggcgagtaattttaagtttcgctatgccggatggggcgtttacgtcgcatccggcaaggaacagacaaacagtttcaaacgctaaattgcctgatgcgctacgcttatcaggcctacatgatctctgcaatatattgagtttgcgtgcttttgtaggccggataaggcgttcacgccgcatccggcaagaaacagcaaacaatccaaaacgccgcgttcagcggcgttttttctgcttttcttcgcgaattaattccgcttcgcaatttatccataaaataaatttaaaataacaaaacataattaaataaaatgtaaccgctttcatcttgctggaatttcacgcttttattcttctgcaagcctttcaaccgcaaacttaagccttgtaacaaaaatcatcaaaatatgtgcggttgctcatgttcttacattctggttacagaaagagattgataattcgcgtcgcgaaaaatagtctgttcctgtagtcagcgagacttttctcaacgctacttttttaatttttattttttcgctgttcacctttggtgcagcaatttatacgtcaaagaggattaacccatgcgtacgtttagtggcaaacgtagtacgctggcgctggctatcgccggtgttacagcaatgagcggctttatggcaatgccggaggctcgcgccgaaggattcatcgacgatagtaccttaaccggcggtatctattactggcagcgtgaacgcgaccgtaaagatgttaccgacggcgacaaatacaaaaccaacctttctcactccacctggaatgccaacctcgattttcagtccggttatgctgctgatatgttcggccttgatattgctgcgtttacggcgattgaaatggcggaaaacggcgacagctcccacccgaacgaaatcgcgtttagtaaaagtaataaagcctatgacgaagactggtccggcgacaaaagcggtataagcctgtataaagctgcggccaaatttaaatacggtccggtttgggcgagggcaggttacattcagccaactggtcaaacgctgttagcgccgcactggagctttatgccaggtacttatcagggggcggaagccggggcgaattttgattacggcgatgctggtgcgttgagtttctcctacatgtggaccaacgaatacaaagcgccgtggcatctggaaatggatgagttttatcagaacgataaaaccaccaaagttgattatctgcactcctttggggcgaaatacgacttcaaaaataacttcgtactggaagcggcatttggtcaggcggaagggtatatcgatcaatattttgccaaagccagctacaaatttgatatcgccggtagcccgttaaccaccagctaccagttctacggtacccgagataaagttgacgatcgcagcgtcaacgacctttatgacggcaccgcctggctgcaagcgttgacctttggttaccgggcggctgacgtagtggatttgcgcctcgaaggcacctgggttaaggctgacggtcagcagggatacttcctgcaacgtatgactccaacctacgcttccagtaacggtcgcctggatatctggtgggataaccgttctgacttcaacgccaacggcgaaaaagcggtcttcttcggtgcgatgtatgacctgaaaaactggaatcttccaggcttcgccatcggcgcttcctacgtttacgcatgggatgctaaacctgcgacctggcagagcaatccggatgcgtactacgacaaaaaccggactattgaagagtctgcctacagcctggatgcggtctataccattcaggacggtcgcgccaaaggcacgatgttcaaactgcatttcaccgaatacgacaaccactccgacatcccaagctggggcggtggttacggcaacatcttccaggatgagcgtgacgtgaaatttatggtaatcgcaccattcaccatcttctgatgcccgacgcggcaggttttgtgcctgccgcacgtttgaggaatttgctatgaaaaaactgattctcatcgccataatggcaagcgggctggtagcttgtgcgcaaagtaccgcgccacaggaagacagtcgtctgaaagaggcatacagcgcctgtatcaacaccgcacaaggtagcccagaaaaaattgaagcctgccagagcgtgttaaacgtgctgaagaaagagaaacaacatcagcagtttgccgaccaggaaagtgtacgcgtactggattatcagcagtgtctgcgtgcaacgcaaaccggaaatgatcaggcggtgaaagccgattgtgataaagtctggcaggaaatacgcagtaataacaaataagtgagagctgtaactctcgcttttcttatttcccttgcataaaaaagccaacccgcaggttggcttttctcgttcaggctggcttatttgccttcgtgcgcatgttcatcttcgcggcaatcgccttcggcacagtgaccgtaaagatagagactgtggttagtcaggcgaatgccatgttttgcggcaatttcacgctgacgcgcttcgatggaatcatcactaaattcgataaccttgccgcagtcgaggcagatcaggtgatcgtggtgatgttgctgtgtcagttcaaatacggatttaccgccttcaaaattgtggcgggtgacgataccagcgtcgtcaaactggttcagtacgcgatataccgtagccagaccaatttcttcacccatatcgatcagacgtttgtataaatcttccgcactgacgtgatggttgtccggctcctgaagaacttccaggatttttaaacgaggaagcgttactttcaggccagctttctttagggcggtattgttatcagtcatgcggaatctgtcctgttactaagcggttcacttcattagaagaagtgacagaatttgctcttgagataatgcgtatcattatagaattgccacgcctaaatgaaaaccacaagtccctggcaaatattgttaataaaaacgtggcacagcttacatttacaacggcaaggccacttgaacaccgggacattgtacaggtacaacagcaaaagttacaaatttgtagcaattattttgattggcattatctattaatacggcgtagacatgagtctacgccgcatcacatcaggcattgagaatttcgtcgagatgcaactcttcagaaatctgtttaacccatttttctacacgttcagcggtcagttccggctgacggtcttcgtcgatagccagaccgacaaagtggtcgtcatctgccagacctttacttgcttcgaaatgatagcccgcagttggccagtgaccaacgatggttgcaccgcgcggttcaatgatgtcgcggatggtgcccaatgcgtcgcagaaatattcggcgtaatcttcctggtcaccacaaccaaacagcgcaaccagtttgccgttgaaatcaatctcttcgagagtcgggaagaagtcatcccagtcacactgcgcttcgccgtaataccaggttgggatgcccagcagcagaatgtcataagcttccagatcttctttgctgctttttgcaatgtcatggacatcggcaacgtctttaccaagctgtttttgaatcatttttgcgatattttcggtattaccggtgtcgctgccgaaaaagatgccagtgatagccatgagtgaaataacctcttgaaacttattgaaatgggggtggaaaattgcccacggataaaggcaatcatagcagaacaggcagtcttgcggaatcagcaaacgagcaggactgcacactgtgctacatgaaagtggaaatttaaacgatgccctgactacgcagcgccgccagttgctgcattaacatctcttcgatcagttcgctacggctcatattgcggctctccgccagctcgttcagcgcctcgacagcttccgcgttcagcttcagttcgacacgcttaaggccacgtactttgtcgcgttttagctggttgcgtttattaatacgcagctgttcatcgcggctaagcggattagttttcggtcgtcccggtcgacgctcgtgcgcgaacagatctaatgtcgtacggtccgtttgttctttggccatgatcttggtgacttcgggggaaacaatcagccaggcctctgcccggatggatagcgcgccataatacatcagcgcgatgagtcacgccaacgcccacgcgcggaaagcgacgcggacgctgggtttttaatcagttgcgttaatcattgagatagcgacggatagcgcgtaataccgcatccggtttttcagcatggacccagtgacccgcgcctgcaatcacatgcgcccgtgcctgtggaaattgagccagtaaatcatcacggtactgctcgctaacatacggagaattgccgccagggataaacagggcagggtgatcccatgccgggattttctcccaacctacaatatgcggatactgatcccacaataccggcacgttaaagcgccactccccgtcaacaaaagatttcagcagaaactgaatcaccccttcttcattaagatgctggcgcattattgctgctgcttgctggcgagtttgtgcgtcgctttcactgaccgcgttgatagccgcaaaaatctcatcatgacggcgtacgtgatagtcgaccggcgcgatatcgatcgccaccagtttatcgatgcgatcggaggctagtgcagtaagtgccattaccgctttaccgcccatggagtgaccgataaatgttgctttgtcgatctgctgtgcatccagagtatcaacaagatcctgcgccatcgccgggtaattcattaccggatctctcggactaagaccgtggttacgcatatcaacctggatgatattgtgatcgtttaccagatcgcgagccagtacgccaaggttgtcgaggctgccaaacagaccgtggacaagaacgatgggagaattattgtgctggttttgtgcagtttgcgcgcggatattcaatttcatggcaaagttctttttttcgcgttgtcgggttagggtattatgttgaccattgtgccacagggctgcaacaaataaggtttattccgagtttttctgcaagccaggcttgacgctatccgctgccgggatttattcatatactcctggcgacttgtattcagctaagacactgcactggattaagatgaaaacgattgaagttgatgatgaactctacagctatattgccagccacactaagcatatcggcgagagcgcatccgacattttacggcgtatgttgaaattttccgccgcaagtcagcctgctgctccggtgacgaaagaggttcgcgttgcgagtcctgctatcgtcgaagcgaagccggtcaaaacgattaaagacaaggttcgcgcaatgcgtgaacttctgcttagcgatgaatacgcagagcaaaagcgagcggtcaatcgctttatgctgctgttgtctacactatattctcttgacgcccaggcgtttgccgaagcaacggaaagcttgcacggtcgtacacgcgtttactttgcggcagatgaacaaacgctgctgaaaaatggtaatcagaccaagccgaaacatgtgccaggcacgccgtattgggtgatcaccaacaccaacaccggccgtaaatgcagcatgatcgaacacatcatgcagagcatgcaattcccggcggaattgattgagaaggtttgcggaactatctaaaacgttgcagacaaaggacaaagcaatggcaatccacaatcgtgcaggccaacctgcacaacagagtgatttgattaacgtcgcccaactgacggcgcaatattatgtactgaaaccagaagcagggaatgcggagcacgcggtgaaattcggtacttccggtcaccgtggcagtgcagcgcgccacagctttaacgagccgcacattctggcgatcgctcaggcaattgctgaagaacgtgcgaaaaacggcatcactggcccttgctatgtgggtaaagatactcacgccctgtccgaacctgcattcatttccgttctggaagtgctggcagcgaacggcgttgatgtcattgtgcaggaaaacaatggcttcaccccgacgcctgccgtttccaatgccatcctggttcacaataaaaaaggtggcccgctggcagacggtatcgtgattacaccgtcccataacccgccggaagatggtggaatcaaatacaatccgccaaatggtggcccggctgataccaacgtcactaaagtggtggaagacagggccaacgcactgctggccgatggcctgaaaggcgtgaagcgtatctccctcgacgaagcgatggcatccggtcatgtgaaagagcaggatctggtgcagccgttcgtggaaggtctggccgatatcgttgatatggccgcgattcagaaagcgggcctgacgctgggcgttgatccgctgggcggttccggtatcgaatactggaagcgtattggcgagtattacaacctcaacctgactatcgttaacgatcaggtcgatcaaaccttccgctttatgcaccttgataaagacggcgcgatccgtatggactgctcctccgagtgtgcgatggcgggcctgctggcactgcgtgataagttcgatctggcgtttgctaacgacccggattatgaccgtcacggtatcgtcactccggcaggtttgatgaatccgaaccactacctggcggtggcaatcaattacctgttccagcatcgtccgcagtggggcaaagatgttgccgtcggtaaaacgctggttagttctgcgatgatcgaccgtgtggtcaacgacttgggccgtaaactggtagaagtcccggtaggtttcaaatggtttgtcgatggtctgttcgacggcagcttcggctttggcggcgaagagagtgcaggggcttccttcctgcgtttcgacggcacgccgtggtccaccgacaaagacggcatcatcatgtgtctgctggcggcggaaatcaccgctgtcaccggtaagaacccgcaggaacactacaacgaactggcaaaacgctttggtgcgccgagctacaaccgtttgcaggcagctgcgacttccgcacaaaaagcggcgctgtctaagctgtctccggaaatggtgagcgccagcaccctggcaggtgacccgatcaccgcgcgcctgactgctgctccgggcaacggtgcttctattggcggtctgaaagtgatgactgacaacggctggttcgccgcgcgtccgagtggcacggaagacgcatataagatctactgcgaaagcttcctcggtgaagaacatcgcaagcagattgagaaagaagcggttgagattgttagcgaagttctgaaaaacgcgtaaacacatttaataaaaaaagggcggtcgcaagatcgcccttttttacgtatgacaaacacagaattgcctgatgcgctacgcttatcaggcctacgaggatggtgcaatatattgaatttaagcgattttgtaggccggataaggcgttcacgccgcatccggcaaaaacaacgaacactttgtcaacaaactgagtagctcaaggaaatcccaatgaagaccaacaggagtctggtcgtcatagtgagtctaattaccgccacattactgctgactgcatgcgcccaacctgaacaaagtagtttagctggcgactggttactgacccctaaagataaaaccagaggattaacgggtagcattgcggtaaatattgcacctttccggtgtaagacaaattgccgtggtgataacttacctgataatacccgccgctggcagttgagtggcgggaacgaaaaagaacttacttatcttcataatatgagtgcacaagaaaaggtcggtttaaatcccggttggcaatgctacaccagtttttttatgcgggtttgccagggcaagcccggcactcgaccgatagtcaatgaggattatgtcagcgaaagcggattttttggcagcatgatgcatgtcgggattattgagttacgacgctgccagagtgaaaattgccagcaagaattgaaagcgataaatacacattaaaatagtgagtccgggaatgaaacccggacctgaacatgtcttattgcgtgaatgtttctttcatttgatactgcatttcccagagttcagtaaggctaataacttttcttgttcttgcttcttcactttgtacccataagaaagggtagaacgtgaaggcttccgttgcgcttaattttattacgtcttctcgccattgctgccatcgtacattttcatagaaggtatctaaatcaccggataatgcccactgaagaaactcagaatatccaacttccagactttcccaattcagcgtatctggcgcaaaataataaacgcagccagtatcttccccaagatcgccaccattaagagcaaaaattacccctgcgacatcgtcagcgatgggtaaagcccgcacgcctgcgaattcagggcgttgtgtccaacttactggatctcgtggcaaccgggggtgaccagatcctgctatgcgtaattaaccattatcaatcagcagacctccggagccatagacaagcgcacccatcggactttttgttgtcacctgtaattgataaagtgcggtttcggctaaatctttattaaccggtaagagttcggtatggtttgtggcgtcttttaaccagttctggattattggccaggcactatcttcagtatttactaactgattcatttcacgcatcgctacttgctccttgtgtgctacggtgtcatttatgatgaggaattgtatggaacattttttaaatattaagttccttatatttgaataaaaaatgactttatccatacattgccacttttttcaaagcataaaccgatacccaataccggtttcagtaataaaatggcgaggccgggccggatcctgttccagtttttgtcgcagatgccccatataattacgcaaatagttgctgtgttcgatcgcgtttagaccctacatctgccggatgcggcataaataacgaactatttgccaacaaacagaaagggcgatcattcaatcgcccttttttactttgttttattaaccgtgtttatttttcagttcaaagcgtggacttaccagaccatacagtgtccaaccaaggaaggtcacgatggaaccgtacagcatggcttcttccccggaactgtacagcgcataaaagctatacatcgcgccaacaaaagcaacaaagtttgcaactttcgctttactggggggcacattagcgaccttctgaataatgactaatgccgccatactcagaatatacggaatgatattggtcaccacggccaggttaaccagcacgttgaactgactgtttaggctcgggctaatggtcatcagtgccaatccactctgaataatcacaatggtcaacattccctgcaccggtgcatccactttggttacacgggagaaaattttagggaagtagccttcatcagaactagatttaaacacctgggcaatggtgaactgccagccaagtaggctaccgcagcaggacatcaccatcagcgccataatgactttacccacttccggcgtgaacatctgcgcgaaggccagaccaaatggtgccgtactatttgccagctccatatttggcacaatcccggcaatcacgttggtggagacgatataaatcaccgccgcacctaacgtaccgccgagtaccgcgattggcacattacgttccgggttttccactacatcagtattcgcacacgcagactccagaccaagaaaagcccacagcgtcatagcgatggaagaacctaccgcactgaagaacggtgcatgatgcggattccaggaatcaacgtacagcgtcgggctaaaccagaaccagccaataatgcacagaccgacgaccggaataatgaccccccacacggtaatgctactgatttgcccggtaatgcgcgcaccaccaaagttagccacggtacaaatccacagcaccccgatggtcgcaagaccaatctgcactgggctcaaactcgcgccgagcagttcggtgccgtaaccaaccgcgctaatagcaatcgcgacgttagcaatcagcagactgacgccgtaggtatagttcgccataaagttaccggatttaccgaaagcatactcggcataaccgcccataccgccacttttacggctgaacataccgcattttgcgaatgcccatgccagtgccatactgcctacggctgtcaccagccaggagataatactgattgtcccgacttcggcaagctttgtcggcagcatgatgataccggagcccatcatgttgaccatcgtcagtatggttaactgaacgacgcccattttgttgcttttagcctgactcataatttttcccctttcaacagggtgctttgcgcatcacgaggcttgatgacatagcaccaaacttgcttacgaccatcatgttcttcgatatagacaccctgcagctccggtgcaaaacctggcagcaggttgatcccttcttccagagcgctgaagtaacgcagaacagcaccaccccagatttcacccggaacaacacacagcacacccggaggataaggaagcgcaccttcggcagcgatacggccttctgcatccggcagacgaaccagttccacttcaccgcgtaaataggcgtagttggcttcttgcggattcatgctgacgcgtgggaagtgctccttacggaacatctctttttgcagttgtttcacgttgtggcgggcatacaaatcatgcatttcctgacacaactgacgcagggtataaccggcgtagcgctcttcatgctgtttgtagatggaaggtagcacttctgctaatggcgcgtcggactcaagcagtttttcgaagcgtaccagcagggcaacaagttgctgaagtttggccatatcttctgccggagtcagcaggaagaggatggagttaagatcgcatttttccggcactacgccattttcgcgcaggaagttagcaagaatcgtcgcgggtacaccgaacgcttcatattcgccgttacgtgcatcaatacctggggttgtcagcaacagtttgcatggatcgacaaagtattgattctctgcatagccttcaaaagaatgccagtgttcccctggtacaaactggaagaagcgcagatcaaccgcaatttgcgctgtttcatagctctgccagggtttaccatccaccagttcaggtacgaacggacgaatatgctgacagttatcgaggatcagtttgcgggcattaatgccatttaccacacaatccatccacatattacgaccgctgacaccttcatgcattttggcgttgatattcagtgcggcaaacagcggatagaacgggctggtggaggcgtgcatcataaaggcgttgttcatgcgtttgtgcggtacataacgctgttgccctttgatgtggctgtcttttttatgaatttgactagtctgagaaaaaccagcctgttgtttatgcacagattgcgtaaccagaatacccggatcgttctcattaagatccagcaacagcgggctacagtccgccatcatcggaataaactgttcatagccgacccatgcactgtcaaacaggatgtagtcacacagatgaccaattttatccaccacttggcgggcgttataaatcgtaccgtcgtaggtgcctaactgaatcacagcgaggcggaaaggacgagcctcttttgcccgctgcggtgcgacttccgcgatcagctcacgcaggtaactttcttcaaaacagtgcgcatcaatgccaccgataaagccatacgggttacgtgccgtttccagataaaccggtgttgcaccagcctgtagcaacgctccgtggtggttagatttgtggttattgcgatcaaacagcaccagatcacccggtgttagcagggcgtttaaaaccactttgttagaagaactagtgccatttaaaacgaagtaggttttatcggcattaaacacttttgccgcatgttgctgtgcaatgcatggcgcgccttcgtgaatcagcagatcgcccatcgctacgtcggcgttgcacaagtcggcacggaacagcgcctcaccaaagtattccacaaactgattccccgccggatggcgacggaaaaattcgccgccctgatgaccagggcaatcaaacgcgctgttaccttgattgacataatcgaccagtgcgcggaagaaaggtgggcgcagttgagtttcataatggctggcagcggtttctaactggcgaccataaaattctcgtcggctttcgcaattctcaaagacaccgctaatacggggcaaatactctgcgggtacacgttcttgattttcagtagcaataaataccgggatgccataacccgtggcatcgatttcatcgagttttccgcatgtaacatcgttgaggcttaaaactattgccgccacatcgatattacgactttcattaatgtagatacattctcgctgcgtggtaaaacagtccgggcaagaatcactaaccgcaatttttaatttactcatttttcatctctttattttaggtaatagcaggtcctcaatttctcgaatgagaaatcgatcgtgccggaaaaaagcaaagttaccccgctgataaataaatcaggtagattgcttttttcagaatgcagaaacccttaccagtcaggtggctgataatacaagggttaacagagaatgagcactgcggaatacaggcatatgcctgtaatacagagagtcaggaagacctgtacgctgaagtgcccttagtcggtagactaacgggcattgaagaagtgaaagtcgaagctattgcgatgagcaaacttcataatatgagttgtccgccttatatggggcatagtgcggctgttattttccatttaatttacctttcctgatgtgaatgaaggtgaagatattctatccaggaaatacggttgaactgtgaaggtgatcaataaaaaatgatcaatcttaatttatttaatgatgagctttttactcagtaatataaaatattgaattgttatttttgtgtgttgtttaagataaaaagccgtatttattattacggctttaattaataaaaggcaggctgtattaaaattaatattcaaagcataaaccgatagccaataccggtttcagtaatgaaatggcgtgggcgggcgggatcctgttccagtttttgtcgcagatgtcccatataaatacgcaaatagtgactgtgttcgaccgcgtttggcccccacacctggttaaggagctggcgctgggtgagtacttttccggcattgttgagcagcaccgccagcaggcggaactcaattggtgtgagatgcacctcttcctcaccccggtgaatcacgcgggcggctaaatcgacggtaacatcggaaaattttaccagcggatcgggcgcggtggtggcagagtggcggcgtaatgcgacgcgcagacgggcctgcaattcgccaatgccaaacggcttactcagataatcatccgctccggcatccagcgcggcgattttgtcgctctcttcgctgcgtgcggaaagcacaatcaccggcaccgcgctccactggcgcaggtcgcggataaactcaatcccatcaccatcgggcaggccgagatcgagaataatcaaatctggcttacgggttgccgcttccagcaagccgcgttgcagcgtttcggcctcaaagacgcgcatcccgtcgccctccagcgccgtgcgcagaaagcgacgaatagcctgttcatcttcaacaatcagaacgtttgtcacatatcctcatgaaattcttcaagttcaggggcagtttgctggggaagtgtaacacgaaaacaggcaccaccttccggtcggttgaacgcggtaatagtgcccccgtgtacatccactatcgcccgacaaattgccagtccaagccctacccccggtactgcgctctctttattcccgcgagcaaacttatcaaatatcgtctgctcctggcctggcggaagaccggggccgttatcccagacatccagttgtagattttcgccctcaacgtgggcatcgataccaatttcggcctgcgcacccgcatatttcaccgcgttctccagcagattaatcagcacccgttcaaagagtggcccgtcaacgtggattaaggtcagcggttctggcagagaaagattgatggggctgcttaaacccggttccagcatttgcagcgcgctgccgactacttcttccagcgttaaccactctttcttcaaattaaagccgccggactgaattcgcgccatatccagtagattattcaccagtcgggtagtgttcagcacatgctgacggatctcgctggcctggcgggcgtggggacttccttcgcttgccagatcgagcgttaagatttctgcctgaccaaacagcaccgtaagcggcgtgcgtaaatcatggctaagcgccgccagcagggcgttgcggatctgttcacgttcgcttgccatccgcgcctgttcttcgctggcggttagcgtcagccgctcaagggcattggcgactaacagcgtaaacgtctccagcaggcgctgctgttccgggatcatcaactggcgcagattccccggctccaccaccaccagcccgtaggttttctcgccgctttttagcggcaaaatctggtacggtacaccgggtaacgtgtcggtgcccgcgcccgcaggcaggcctttatcaaaactccactgcgcgatggcatcgtcccacggcgtcattccttgcggatgtgttaacggctgcaatttaccgttgtcatcgggcaacaacacctgactgcgggcatgaaacgtggaggcaataaattgttcgctggtggcagcgatatcctgcggactgcggcccaccgccagagctttgctcatttcatataagtgccgtgtgcgttgctcgcggtaacgggctacccgcgcctgataacgcacgccagcagtaaggttcccgatcaccagcccgacggttaacatcaccgcgaaggtcagcagatattacacatcagagacggcgagcgtgccgcgtggggcgataaaaaagagatcgaaactcactacattaatgacggtggcaaccacactaggccagcgtccataaaatagcgccaccaccaccacgccaagcagatacagcatcaccaggttggcggcatcaaacgccatcagccactgcatggcaattaaggtgataacggcgcataacgcggcggcaaccacgcatccctgaatttgtacacgccacttgtctttaaaagagcggttatccggcgcgttgttaatcgtgcgggcgggtggttcatcaagcgcgaccagcacctgatcgagatcgggggcgatgcgcgccagtcggtcagcaaacgtttcccgacgccaccagcggcggctggccgggcgaccgagaataatcttgccgagattatgttcacgggcataacgcactaccgctttctcttccgctggatcagaaagtgttgccgtctccgcgcccagttcctgcgccagacgtaaggcgctgagaattgcccgacgttttttttccggtaagcggtgcagggcaggggtttcaacatacaccgcgtgccagacgctacccagccgactcgccagccgcgccgctgcgcggaccagtttttcgctgccggtgttatggccgatgcataaaaggatcgcgtcgcgcgtgcgccacactttctcttcgccaggatgcccccgccaggcgcgcatttgctcatcaacgcgatcggcagtacggcgcagtgccagttcgcgcagggcgatcagattacctttgcggaaaaaatgttcaatggcgcgctccgcctgcccggcaatatagactttgccttctttcagccgctggcgcagatcgtccgggggcaagtccaccagcaccacgtcgtcggcggcatcgaaaaaaggatcgggcacggtttcccgtacctgaattccggtgacgccgctgaccacatcattcagactttccagatgctgaacgttgacggtagtgaaaacatcaatgccagcttccagcagttcttcgatatcctgccagcgtttgggatgacgggaacctggcgcattactgtgcgccagttcgtccattaagatcagcgccgggcggcgggcgagggcggcatcgagatcaaactcgctgatatgccgcccacggtacgcctggcgttttaacggcagaacagccagcccttccagcatggcggcggtatcttttcgcccgtgggtttctaccacgccaaccacaatatccagcccttgcgcccgcagtcgctgggcttctgccagcatcgcccaggtcttcccgacgcctgcacaggcaccgaagaaaactttcagcttcccccgatgcggcgcggcagtttgttccagcagacgatcggggtcgggacgtaagggttcgttattcatcaagtttatccagcgccagattgagttcaacaatgttgacaaccggctggccgatatatttcaccagcggttgttggctgtattttgcgatcagttgcgtgagctgttcaacgctgagattacgcgctttcgccacgcgtgggatttgccaggccgccgcttgcggggtgatattattgtccagcccgcttgcgcttgccgtcaccagttcaaccggaacgctcgcgctggcatccgggttagcggcccgtaatgcagcaacgcgtgcggctattagtttatccagctcagggttactgaccgccagattgctcccgccagaagcctgtggattatagggcatttctgccgttgcgctcgggcgaccatgaaaatagccgttgccggtaaaattctgcccgattaatgcgctaccgcgcaccgtatcaccttcacgaatcaagctaccattggcctgccagggaaaccaccattgccccagtacggtggtcagcagcgggtaaacgccgccagtaatcaataacagaaagataaatgtacttaatgccggacgtaatccactcatggtaaacctcacaccagaccgcaaacggtcagcagtaaatcaatgactttgataccgataaacggcaccagcagcccacccagaccgtaaatccataagttacggcgcaacatggcagaagcggtaagcggtttataactcacgccttttaacgccaggggaatcaaaaagacgataatcaaggcgttgaaaatcaccgcactgaggattgcggagtcggggctatgcaggcacatgatgttcagcgcatttaactgcggatacgttgccgcgaatgccgccggaataatggcgaagtatttcgccacatcgttggcaatgctgaaggtggtcaggctgccacgggtcatcagcatctgtttgccaatgtgcaccacctcgatcaacttggtcgggttagagtcgagatcgaccatattgcccgcctctttcgccgcctgggtgccggagttcatcgccaccgcgacatctgcctgcgccagcgccggagcatcgttggtgccgtcgccggtcatcgctaccaaacgaccttccgcctgatactgacggatcaatgccagcttggcctccggtgtcgcttcggcgagaaaatcatcgacacccgcttccgcagcaatcgcggcggcagtcagacggttatcgccggtaatcatcaccgttttaatgcccattttgcgcagctgggcgaagcgctctttaataccgcctttgacgatatctttcagcgcaataacgcccagcacacgagaaccttccaccaccaccagcggcgtggctccctgacgcgcaacctgatcgactttttgatcaacatcggtagggaagtgaccaccgttagcctcaacatggcgacgaatggcatcgacagaacctttacggatcatgcggttgtcgatgttgatcccgctcatccggctttgcgcagtaaacggtacaaaggtggcatggaggctctgcacatcgcgctcgcgcaggttaaaacgctgcttggcgaggatcacaatactgcggccttccggcgtttcatcagccaggctagccagttgtgcggcgtcagccagcgttttttcatccacgccctgcgcggggataaactcgctcgcctgacggttaccgagtgtgatggtgccggttttatccagtagcagaacgtcaacgtcacctgccgcttcaactgcacgtccgctggtggcaatcacattcgcgcctagcatccggctcatcccggcgacgccgatcgcactcaacaggccgccaatagtggttgggatcagacagaccagcagcgccaccagtaccgttacgctgactgcattaccgccccacgcggaaaacggccacagcgtggcggttgccagtaaaaagacgatagtcagggcaatcagcagaatggtcagggcaatttcgttcggcgttttgcgtcgctgtgcgccttccaccatcgcgaacatccgatccagaaatgtctcgccggggttaacgctacactcaatcaccagccagtcagaaagaatacgcgtgccgccggtgacggaggcaaaatcgccgccggattcacggatcaccggtgcgctttccccggtgatggcgctttcatcgacgcttgcacccccttcaataacttcaccatcgcaggggataatatcgccagcttctaccagtacgatatcgcctttacgaagttggtcggcaggaactttgtccgccgcagcgccatatttcggctcacgcagcttgcgggcaaaggcagtttttttcacccctttcagactgttggcctgcgctttactgcggccttctgccagcgcctcggcgaaattagcgaacagtacggtgatccacagccaaccgctaatggccgcgctaaacagcgcattgccgggcatcgcaccgcttgccatcgcgatgctaatacaggtggtcagcagactgccgatccagacgataaacatcaccggattgcgccattgcgcctgcgggtttaattttttcaccgcttctttcagcgcctgaacgacaagtgttggttcgaatagcgccagttgtttacgactcatattcagtgctcactcaatatcatcaggagagatattccgccaccggaccaagcgccagggcagggataaaggtcagtgcgccaaccagcaacacggtgccgattaacaggccaacaaacagcgggccgtgcgttggcagcgtgccggagctggcggcttggctctttttactcaccaggctaccggcaattgccatcaccgggataatcaccccgaagcgaccgacaaacatgcagaacgccagtaaacagttccagaacggagagttggcgcttaatccggcaaaggcgctgccgttgttgttagcggcggaactcacggcgtacagcacttcgctaaaaccatgcgggccagggttgagcatggcgctacgtccggcgtcggtcatcatcgccaacgccgcgcccatcagcaccagcgtcggggtaaccagaattgccagtgcagtcagtttcatctcgcgtacgtcgatttttttacccagatattccggtgtacgaccaatcatcagcccggcaataaacaccgccagcaggacaaacagcatcatgccgtaaagaccagaaccgacaccgccgaacaccacttcaccaatttgcatcagccacatcggcaccatgccaccgagagcggtaaagctatcatgcatcgcaatcaccgcgccacaggaagccgccgtcgtcacgaccgcaaacaggctactgaccagcacgccgaaacggctctctttaccttccatattgatgctgctgtccgtgcccagtgccagcagatgaggattaccctgaacttctgcccacatcaccacgcctacgcagatgacaaaaatcacactcatcgcccacagcaacatgcgcccctggcggcgatcgcccatcacttcaccaaaggcaaagcacagcgccgttgggatcaagaagatcgccagcatctgcacgaagttggtcagtgcggttgggttttcaaacggatggctgctgttggcattaaagaagccaccgccgttagtaccgagcatcttgatcgcttcctgagaagctacaggccccatgggtaacagctgttgcgctccttcaacggtattcacagcctgataaggcagaaagttttgcagcgcaccttgttgaataaaaaacagtgcaatcaacaacgccacagggactagcacccataacgtgatgcgtagcagatcgacccaggcattcccgagcgtgctcatgctctggcgggtaaacgcacggatgagggcaaaaatcaccgcaatcccgctggcggcagaaagaaagttttgcaccgttaagcccgccatctggctgaaatagctcaacgtggtttcaccgctataagattgccagttggtattggtgacaaagctgacggcggtattcagcgccagatcccagctcagccctggcaactgctgtggattaagcggcagatagtgctgaccgagcaacataaaaaacagcaccgccagccccagcatgttcaggccgagaatggcacaaagatattgcttccagttcatctcacggtcagagacgccaagtgcgcgaaaaagtacgcgctcaacgcccgttgtaccgggaagaggaatgtcattaatcagccgcgccagcccgctgcctaaaggacgcgccagcaccattaacaccagtaaaaacgtggcgatcagtaagaacccttgcgcagccatcagaacgcctccgcattgatcagggcataaaccagataacccagtaataaaaacaccagcaatacgccggttatcacgcctgcactcacagtgcacctccagtggcctaaaagtgataccggaagggtagaattctggctgcaaagatttcgcaaaaatctgcgggcggggtgtaaaaaaagtataaaaatggcaaaagccatgatttaactaatgtttagtattaatttaacttttgtgtaacttaattacaggatgaatgtaaataaaccatcaataagcaaaaataagtggtcggatgagtagtaaaattacacaaaaggcggtactattttcatcagataaacaaattcatttttccggtgccattcaccgggtagatacaaaagggggagaaaagtatggaactctacagagaatatcctgcatggcttatctttttacgccgtacttatgcggttgcagcgggcgttctggcgctgcctttcatgcttttctggaaagaccgcgcccgcttttacagctacctgcatcgcgtctggagcaaaaccagcgataaaccggtgtggatggatcaggccgaaaaggcaactggtgatttttattgattgctgagttttgaatacattgaacgtctacacttactcctgtaaaccgctcaggagcagtaatgaatctacaacgatttgatgacagcaccctaatccgtatctttgcccttcatgagttacatcgactgaaagaacatggcttaacgcgcggggcgcttctcgattatcacagccgctataaactcgtctttctggcgcattctcagccggagtaccgcaaacttggcccgttcgtggctgatattcaccagtggcaaaatctggatgactattacaaccagtaccgccaacgcgtagttgttttgctttctcaccccgccaacccgcgcgatcacaccaatgttttgatgcacgttcagggttattttcgcccgcatattgattccacagaacgccagcagctggctgcgcttatcgacagttatcgccgtggcgagcaaccacttcttgcgccgctgatgcgtatcaaacactatatggcgctttatcctgacgcctggcttagtgggcagcgttatttcgaactttggccgcgtgtgattaacttgcgccatagtggagttttatgactacccatctggtctggtttcgccaggatttacgtctgcacgataatctcgcactggctgccgcctgccgcaatagctctgcacgcgtgctggcgttgtatatcgctacaccacgccagtgggcgacgcataacatgagcccgcgtcaggctgaacttatcaatgctcaactgaatgggctacaaatagcgcttgcggaaaaaggtattcctttattgttccgtgaagtggatgactttgtcgccagtgtcgaaatagttaaacaggtgtgcgcggaaaacagcgttacccacctgttttataactatcagtatgaagtgaatgagcgggcgcgggatgtggaagttgaaagagcgctgcgtaacgtggtgtgtgaaggatttgatgacagcgtgatcctgccgcctggcgcggtgatgaccggtaatcacgagatgtacaaagtctttacgccttttaagaatgcctggctgaaacggctgcgggaagggatgccggagtgcgtcgctgcgccaaaagttcgtagtagcggaagcatagagcccagcccatccattacgctgaattatcctcgtcagtctttcgatactgcgcattttccggtggaagaaaaagcggcgattgcgcaattacgccagttttgccagaacggtgccggagaatatgagcaacaacgagattttccggcagtggaaggcaccagccgtttgagcgccagcctggcaacgggcgggttaagccctcgccagtgcttgcatcgcttgttggctgaacagccgcaggcgctggacggtggggccggtagtgtctggcttaatgagctgatctggcgcgagttttaccgtcacctgataacgtatcaccccagcttgtgtaaacatcgtccatttattgcctggacggatcgtgtacagtggcagagcaatcccgcacatttacaggcctggcaggaaggcaaaacgggatacccgattgttgatgccgctatgcgtcagcttaacagcactggctggatgcataacaggctacggatgattacagccagttttctggtgaaagatttattgatcgactggcgcgaaggcgagcgatatttcatgagccagctgattgatggtgatttggcagccaataacggtggctggcagtgggccgctagtaccggaaccgatgcagcgccgtattttcgtattttcaacccgacaacccagggcgagaaatttgatcatgagggcgagtttatccgccagtggctaccggaactgcgcgatgtgccagggaaagtggtgcatgagccgtggaagtgggcgcagaaagcaggtgtgacgctggattatccgcaaccgatagtcgagcacaaagaagcgagagtacaaacgttggcagcgtatgaggcggcgcggaaggggaaataacagacgcgtcaggcaatcgagcccagatgccggatgcggcgtgaacgccttatccagcctacaaatttgtgcaaattcaataaattgcaggaaatacgtaggcctgataagacgcgtcaagcgtcgcatcaggcatcggtgctggcctattaagactccagcgccagcgcgcggtttctgaatttcagcgcctgatacagccaaatcatcagtaccagtcctacacacgccagtgcgccccaggtaatttgatcaaatacttcaatatatgcattgatggagtagttgatcgccccggaagcatcaaagctagcctggcttgtctgatcggcaatcacgcccgccagatagttcgcgatcgcgccagaaagcagcatgtagatgccggttaatacgccggtcacaccggggatttcaatgcgcgtaatttggctcatggcaaccgggtcgataaacagttccgcaaagcccatcaccgccaggcctaataccatcagtggcagagaagagtgaccatacattgcggaccagcgggcgcttaaggtcagaatgcagaatccggcgctcatcaggccaaggccaagagcaaatttcccccagatgcgcacggtacgattacccgcgacactctcttttaccacccacgccaggaacacaccgcacagcataactgcgaaggcattaatgctctggaacatcgcggtcggaacggtataaccaaacatatcgcggttaacgaagcggtcgatataaaggctaatgctgctaccgccctgttgtgcgaaggcccagaacaacatactgaagaaggtgagcgtcacaatcagccccagctccttccgctgtttctggttttctgctttgcgataaatttttgccagtacacccaggccaataatagtcgcgacaattaaggcgtatacgctccactctttccagaacagtatggtaatcagtgcaggcgttgccaccagcagaaccagcagccatccccagttcggcaggagaaagtttgtcgcacgcagtacttttttgttaacgccgcgggtatgagtgaaatgacgattgccacataagaaaatgaccagacccgcgatcatgccaaccgccgccaggccaaagcccatcgcccagctgtactcttcctgggcgtaaccacaggcgataggtgcgataatagaccccacgttacccgccgcatacatcaggctgaaaccgccatcacgacgcggatcggttggctcatacagctcgccgagcagacagcttacgttagatttaaacaggccatagccgcagacgataatcgccagggacagatagaggaaactcggatggatctcactggcacccagcaccacatgaccgatcgccatcaacaacgcccccagcatcaccgccatgcgattgccgagaactttatccgccaaaaagccaccgaggattggcgtgacatacaccaggctacagtaggcgctaaataactcgtaggcgtgagtatcgttgtattttagttgattggtgagatagagaatcagcagggcacgcatgccgtaaaagctaaaatattcccagatttgcagcgcaacgacatagtaaatagcgcgcggctgacttgcgtgtttattcataataattccacaattgacggcaacgtcacgtaatagttgcgcggcgtgcttgtgtttccttaaagttaaaactttgatacagatctgattatttatgcaatatgctgtctgattgcataaatatacattagctgaagcgtgatgatataaacaatttgcgtcttttggcgtcgggtttgtttcttaatatgtcaaaagattggctatcgacgaactggcgaggtaacgctatgttaacggtgtagctatcagaatacggaaggcgcgaagatgaaaaacaccgaactggaacaactgattaacgaaaaactgaacagcgcggcgattagtgattacgcgccgaatggtttgcaggtggaaggcaaagagacggtgcaaaaaattgttaccggtgtcaccgccagccaggctttgctcgatgaggcagtgcgtctgggcgcggatgcggtcattgtgcatcatggctacttctggaaaggagagtctccggtcattcgcggaatgaagcgtaaccgtttaaaaacgttgctggcgaatgatatcaacctgtatggctggcatttgccgcttgacgcacatcctgagctgggcaataacgcacagctggcggcgttactggggatcacggtcatgggcgaaattgagccgttggtgccgtggggcgaactgaccatgcctgtgccgggactggagctggcttcctggattgaagcgcgtctgggacgtaagccgttatggtgtggcgataccggacctgaggtggtccagcgcgtcgcctggtgcacgggcggcgggcaaagttttatcgatagcgccgcgcgttttggcgtggatgcttttattactggcgaagtttctgaacagaccattcatagtgcccgcgagcagggattgcatttttatgctgcaggtcaccatgccactgaacgtggtggtattcgcgcattgagcgagtggctgaatgaaaataccgatcttgatgtgacctttattgatattcctaatcctgcataacgaataatcagagggatcgaaagtgcaacgagcgcgttgttatctgataggtgaaacggcggtagtgctggaactggaaccgccggtgacgctggctagccagaaacggatctggcgactggcgcagcgtctggtggatatgccgaatgtggttgaagccattcccggcatgaacaatatcacggtgattttgcgtaatcctgagagcctggcgctggatgccatagagcgtttgcaacgctggtgggaggagagcgaggcgctggagccggagtctcgctttattgaaattccggtggtttacggtggtgcaggcggaccggatttggcggtggtcgcggcgcattgcgggttgagcgaaaaacaggttgttgaattgcactcctccgtggaatacgtggtctggtttttaggttttcaaccgggcttcccgtatctcgggagtttgccggaacaactacacacgccacggcgcgctgaaccgcgcttactcgttccggcaggttctgtcgggatcggcgggccgcagactggtgtttatccgctggcaacgccgggtggctggcagttgattggtcataccagtctcagcctgtttgatccggcgcgtgacgaacccatcttattacgtccgggagacagcgtgcgctttgtaccgcagaaggagggagtatgctgaagattattcgtgcgggcatgtataccactgtgcaggatggcggtcgtcacggttttcgccagagcggtatcagccactgcggcgcactggatatgcccgcgttacgcattgctaacctactggtgggtaatgacgccaatgcccccgcgctggagatcacgctcggtcagttaactgttgagttcgaaactgatgggtggtttgctctgacgggtgccggttgcgaagcgcggctggatgataatgccgtctggaccggctggcgattgccgatgaaagcaggccagcgtttaacgcttaaacgcccgcagcacgggatgcgcagttatctggcggtcgcgggtggtattgatgttccgccggtaatgggcagttgcagcaccgatctcaaagtggggattggcgggctggaaggccgtttactgaaggatggtgaccgactcccgattggcaaaagcaagcgtgattctatggaagcgcagggcgttaaacagctgctgtggggcaaccgcattcgcgccttgccggggccggaatatcatgagttcgatcgcgccagccaggatgcattctggcgtagcccctggcagcttagcagccaaagtaaccgcatgggctatcgcttacaggggcaaattttaaaacgcaccaccgatcgcgaactgttatctcacggtttgttaccgggcgtggtgcaggtgccacataacgggcagccgattgtgttgatgaacgacgcacagaccaccggtggttacccgcgtattgcctgtatcattgaggctgatatgtaccatctggcgcaaattccgctcggtcagccgattcattttgtccagtgtagtctggaagaggcactaaaagcacggcaagatcagcaacgttattttgaacaattagcgtggcggctgcacaatgaaaattgacctgaacgccgatctgggcgaaggctgcgccagcgacgcagagctattaacgctggtttcctctgccaatattgcctgtggatttcatgcaggcgatgcgcaaatcatgcaggcttgcgtgcgtgaagcaataaaaaatggtgtcgcgattggcgctcacccgagttttcccgacagggaaaattttggtcgcagcgccatgcagctgccgccagaaaccgtttacgcccagacgctgtatcaaattggcgcgctggcaacgattgcccgtgcgcaaggcggcgtaatgcgtcatgtcaaaccgcacggcatgttgtacaaccaggcggcgaaagaagcacaactggcagacgccatcgccagagcggtatacgcttgcgatccagcattgattctcgtcgggctggcgggaagcgagctgattcgtgcaggcaagcaatatggtctgacaacgcgcgaggaagtgtttgccgatcgcggttatcaggctgacggcagcctggtgccgcgaagccagagtggcgcgttgattgaaaacgaagaacaggcgctggcgcaaacgctggagatggtgcaacacggcagagtcaaaagtatcaccggcgaatgggcaacggtcgcggcgcaaacggtctgcctgcatggcgacggcgagcacgcactggcgttcgcccgccgactacgctctgcatttgccgaaaaggggattgttgtcgcagcataaccccgattaataaagaatgaaaaaaggatatcaccatgcctgaaggcccggagatccgccgtgcagcggataacctggaggcggcgatcaaaggcaaaccactaactgatgtctggtttgccttcccgcagttaaaaccttatcaaagtcaacttatcggtcaacacgttacccatgtggaaacgcgtggtaaggcgttgttaactcatttttccaacgacttaacgctctacagccataatcagctttacggcgtctggcgcgtggttgataccggcgaagagccgcagaccacgcgagtattgcgggtaaaactgcaaacggctgacaaaaccattctgctttatagcgccagcgatattgagatgttgaccccggaacaactgaccacgcatccgtttttacaacgcgttggtcccgatgtgctggatccgaatctgacgccggaggtggtgaaagaacgattattgagcccgcgctttcgtaaccgtcagtttgctggattactgctcgatcaggcgtttctggctgggcttggcaattatttgcgggtggagatcctctggcaggttgggttgactggaaatcataaagcgaaagatctcaatgcggcgcaactggatgcactcgcacacgcgttactggagattcctcgattttcctacgctacgcgggggcaggtggatgagaataagcatcatggggcgctgtttcgctttaaggtttttcatcgagatggcgaaccgtgcgaacgttgtggcagcatcattgagaaaaccacgctgagttctcgcccgttttactggtgccctggctgccagcattaagcgctccgcttcggcgcataggtactaataaaccgcgcaatggcaggccctgtcagcaaaatactgaacaggcgtagggtttgcatcgccataatgagcgccatatcggcattgctccctgcggcgatgaccgccacggtatcaagcccgccggggctggtggcgaggtaggcagtcataaaatcaatgtgcataaaccgggtcagcccccacgccatacccgcacaaatagccagcagagcaaaaatgctcagcaggatttgcggtagcgggcgtagtgcccgcagtaagatttgtttatcgaaaccaagaccaatccgccagccaattgccatatacgccatcgccagcagccattccggtagttcgatggtgatgagctgaccagactggagcactgcgcccgccagcatcgggatgagcatcgtgccggaaggaagacgcagcaggcatcccactgtaccggcaacgaccgcgagcaaaatagtaagcaggagattaatgctcactggcgggaaccagacgatatgctggttaaccgcttcagcgttatcgcccagcatcatgcgggtgaccagaacagcggcccccgcgacgaacagcactcgcagatattgcataaacgccaccaggcgaatatctgcgccgtaatcttgcgccatagcgaccattgccgccgcgccgccaggagaggagccccaggcaccggtatttccaggcaaactgctatagcgcaccaataaccaacccacaatggcgctggaaagcagcgttaccagtaaaattgcaagcacgatcggccagttgacggccagggtggtgagaatgctaccagtgaggttttgcgcaatcatgcagccaagaatggcctgggcggcgagaaaagcagagcggggaagttgcagagtaattccgcgcatactaaagatgatcccggcgatcatcggcccaagtaatagcgccgccgggagatgtaccgcgaggaaaccaatagaaaggagaagacttagcacacataacattccccactgcaaaactggcatccttcgctccctcattattttctctttggtgtatcgatacagcataaagaaagctgggccaggaaaaaataacagcaatcaaggaaaaggggaaaatcagcaattttctgaaagagatgccctttccggcggcaaagggcatcatggtaaatcagttatagttaatcttaaaaagcaccactgtatcgaaggggccagcctcgatgggggtgcctggaatggagctaagttcagccgtataggttttttcgtagaccaacatgtcactggtgaaatcggcgtattcagcatatttattgaaggtataagggctggcgttttcatccagtaaacgtagcttcagaccattaccaatcaacaatgctttatcttcttcaaccaacgtttcttcggtataaaaggaggaactgactttaaatccgtcggtgcattgatcgttttggctcttggtcgttttaatactgaacgttttgctcattgtgtggcgacgtatatccagcaaattaaatttaccaaaatcaatcacctgtgtttccggactaatggaaaaattgacgctgcaatccagcacgcgaatgttttccagaccagtaatatgatatttcaggttttgggcagtagggtcttcgttaacgctaccggcaccgtcaaattgcacgacgatatagtcgctaagcgtactttgataatcatgcggcggcatttctcgtattttgacgtataaccgcatgcgagcgagaaaggtacggctcatatgaatattagcgggatcgccgctgcaaattttgttctgccatcccatcgcgatgatctgctcaggggtataaatatcaatgttcttactgtcgatacactggttagtgtcgatgcgactttttcccagactggcatcgtaatcgacaccgttgtatgtcacgccgagttgataataacgatcctgcacccccggataggggtttacccaggcgtagacatgctcgctttcaaagttgccgttggtattgttgtcacaatagacgggaattttaatatcgtcagattcccagatcttatcaccgggtttggcattgcctggtacagcaaacggttgaatcgcttcacttttttctactgcgccaccagatgtaccaaaatagcagttcagcgccattgcagacttcaacggcagaaataacaggcagatgacgagcaacaatcccttgccagcactcatttcgcctccactgcttgtaaacggcattgtccgctgcagttgagcgtcgtcatgcgtaatgcgccgtaatcatccatgtaaccgagataaaactggctgccgctataacttccggtgtttgtgttgaccgtactaaaaggtgcaaccatcacggttttgaagcctgggagaacgcctttttcatttctccccagataggcaatggtcagataatacgcggtaggatttttcagtgtcagttggttgccctgctggctgacctgtaactgcagttcgaccttttctcctgctttcttgcgtaatgcagccggtcgccagaacaatttaatacgactttgaatagcgacctgaagtatcgcatggtcgctgcttttatccggagcgggaggaatttcgcgcatattgtagaaaaatagcgtttcgcgatcgccaggtaattgtgtggtactggcttgtttcacaacccgcacctggcttgtcgctttcggttccagacgttgaatagggggcaaagcgaccagaagagcatcgcttttctcccctttttcattttctatccaggaataagcaagataaggcagtttgtcactttggttttcgatacgcaggctggtggctttgtcattggcgttaaacacaatgcgtgtgcgatcgggttgcaccgcagcattgcaacccaagctgatggttaacaacattaagggtaatcctttaataaatgtcattctcttttccttaattaatgacaaggtaaaatcaggcgtttggtcgtgtcttccagacgttctggcagatgaataatgcagctttgctcaccccagaccacggtaaacagttgattttcagcgacaccgcttaaccaggcatgtccttcctcgccaaccatacccacgctaatgccgctgtcatcctggcggatatccgcaccgaggggagggaactgaccgctggcgttgcgtatgatgacgttaacgtctttaccggaacgggaagccagacttttgtaacctatcgcgccttcaatccatgtttccttgatgacgttttctgcaactgttacgccgtcgggtaagtcattcatgttcaccgccacggtggaaggctggtaactggaaatcaacggcaccaccgcaatgccaaaatggttggtgtagtcgagattgccctgaaccggaatatctgccacgccatcggtgctgaccatcaggcgtggttcattggtggagctgcggcgatgaaatgctgcaccatattgggttgcggtgaaagaaccgctccagctgctgctgacggaactgtaatcactggcggcataggtaccagaaatatcccactcacccgcactactcaggtgctgatagttaccgctcacctgggctccattgtccggacgatcggattgcagtccggcagacatgccccagctattacgttcatccagcgtatcgttccagctcatgcggtgtatggtgctgtggctactgttttgcatgtcatagccaacccgaccaccgttaccgaaggggaggctaatgctcagataaatctggttgtcgcgatctttatcttcgtagtgggtcgtattgaaactcgtgctaatgctgatatctctccagtcaccaatatcaacattaaaacctgctgtgatgttggcggtcgtggaggcgtctgcattccaccaggtttgatgtagcaggttggcgtaaagattgaggtttagtggggtaatcggttggcccacggataagctgatcgtctgtttttcgtcctgcgcatcgctgtcgttgtatttgtgatccagatagttggcgtagctgtgaaaatgacgatcactgaagcgataagcggcgaggctaatcgtgctgttggtggcatccacttgtttgctgtaattaaaacggtagcttaagccccgctcgtcctgctgagtatcaaaatggctactggcccaggtgacatcaaaggacagtgcgccaagccacagcatattttgcccgatacccattgcggcagaatggtagtcatcatcagaaatcagcaggccgccgtacaggctggtgttactgagcatcccccaggaaacttcattgctaaaaaaggtttcattttcagtttgatgactcatggaaggccgtggctgacccgcggccaatttatagcgaacctgtccctggcgagtcaggaagggcgtgcttgctgcgctaacctggaaattgttcacccgaccatcttcttccgtcactttgacatccagcgtgccctgaacagactgattgaggtcatcaataataaacgggcctggcgggacttttttctggtaaatgacgcggccactttgactgatcgtcaccgtggcattggtctgtgcaataccgctaatttgtggggcgtagccacgcagctcccacggtaacattcgatcgtcactcgccagtgccgcgccggtataagaaaaaccatcgaaaatattggaactgaaatcggtttcgccgagggttaacttagagcctaattgcggtaatggacgaaaaagataggtgcggcttattccgccactctggtcatggttatcttcgctatcggtcttattaagctggtaatcactgcgtaagcgccatgccccggcgttaattccggcggtaccgtaggcattcaggttagtgctgctgctgccgtcctgtgggcggtagctgctggcaaacaagttgtaatccatcaggacaccggcaacaccttctttccatgtagaggggggagcccagttttcactgtgccacgccagccaggcttgcggaatactaatattcagttgctgattggcttgatcgaaattgaagagcatttcaggtcgggaactgaaatcaatacaccgatctatctgtggcaaggactgacggacatctggttttaaaccaaatttatcgaccagactatcattgatgcatggaatggttttgtcaccctttttttgccagttaattttttgcccattactgattttgttgttattcaccgcaacgctaacaaaatattcaccgggagcaatgactcctttttcctttaataaactaatatcaatgcggtcgcgcatacttttatcgagaacattcagattgaattcgaccgccattgcgcaaggcatcgccatgaccaggcaggatacaaaagagagtcgataaatattcacggtgtccatacctgataaatattttatgaaaggcggcgatgatgccgccaaaataatacttatttataatccagcacgtaggttgcgttagcggttacttcacctgccgtgacatcgactgcattatcaatttgttccatccaggcgaaaaagttcagcgtctgttcactactgcttgcatccaggtcaagatctggcgcggcactacctaatacgatgttaccgtcatttttgtccatcagtcgtacaccgaccccagttgcttcgcctgcactggtgttgctcaacaaaggcgtagcaccagttgtcttagccgtgctatcgaaggttacgccaactttggataccggcattccgctaccgttgtcagaagcaggcagatcacagttgatcaagcgaatgtcgacggccactttattgctatgatgctcccggtttatatgggttgtcgtgacttgtccaagatctatgtttttatcaatatcttctggatgaatttcacaaggtgcttcaataacctcccccttaaagtgaatttcgccagaaccttcatcagcagcataaacaggtgcagtgaacagcagagatacggccagtgcggccaatgttttttgtcctttaaacataacagagtcctttaaggatatagaataggggtatagctacgccagaatatcgtatttgattattgctagtttttagttttgcttaaaaatattgttagttttattaaatgcaaaactaaattattggtatcatgaatttgttgtatgatgaataaaatataggggggtatagatagacgtcattttcatagggttataaatgcgactaccatgaagtttttaattgaaagtattgggttgctgataatttgagctgttctattctttttaaatatctatataggtctgttaatggattttatttttacaattttttgtgtttaggcatataaaaatcaacccgccatatgaacggcgggttaaaatatttacaacttagcaatcaaccattaacgcttgatatcgcttttaaagtcgcgtttttcatatcctgtatacagctgacgcggacgggcaatcttcataccgtcactgtgcatttcgctccagtgggcgatccagccaacggtacgtgccattgcgaaaatgacggtgaacatggaagacggaatacccatcgctttcaggatgataccagagtagaaatcgacgttcgggtacagtttcttctcgataaagtacgggtcgttcagcgcgatgttttccagctccatagccacttccagcaggtcatccttcgtgcccagctctttcagcacttcatggcaggtttcacgcattacggtggcgcgcgggtcgtaatttttgtacacgcggtgaccgaagcccatcaggcggaaagaatcatttttgtctttcgcacgacgaacaaattccggaatgtgtttaacggagctgatttcttccagcattttcagcgccgcttcgttagcaccgccgtgcgcaggtccccacagactagcaatacctgctgcgatacaggcaaacgggttcgcaccgctagagccagcggtacgcacggtggaggtagaggcgttctgttcatggtcagcgtgcaggatcagaatacggtccatagcacgttccagaatcggattaacttcatacggttcgcacggcgtggagaacatcatattcaggaagttaccggcgtaggagagatcgttgcgcgggtaaacaaatggctgaccaatggaatacttgtaacacatcgcggccatggtcggcattttgctcagcaggcggaacgcggcaatttcacggtgacgaggattgttaacatccaggctgtcgtgatagaacgccgccagcgcgccggtaataccacacatgactgccattggatggctgtcgcgacggaaagcatggaacagacgggtaatctgctcgtggatcatggtatgacgggtcaccgtagttttaaattcgtcatactgttcctgagtcggtttttcaccattcagcaggatgtaacaaacttccaggtagttagaatcggtcgccagctgatcgatcgggaaaccgcggtgcagcaaaataccttcatcaccatcaataaaagtaattttagattcgcaggatgcggtactagtgaagcctgggtcaaaggtgaacacacctttactaccgagagtacggatatcaataacatcttgacccagcgtgcctttcagcacatccagttcaacagctgtatccccgttgagggtgagttttgcttttgtatcagccatttaaggtctccttagcgccttattgcgtaagactgccggaacttaaatttgccttcgcacatcaacctggctttacccgttttttatttggctcgccgctctgtgaaagaggggaaaacctgggtacagagctctgggcgcttgcaggtaaaggatccattgatgacgaataaatggcgaatcaagtacttagcaatccgaattattaaacttgtctaccactaataactgtcccgaatgaattggtcaatacttccacactgttacataagttaatcttaggtgaaataccgacttcataacttttacgcattatatgcttttcctggtaatgtttgtaacaactttgttgaatgattgtcaaattagatgattaaaaattaaataaatgttgttatcgtgacctggatcactgttcaggataaaacccgacaaactatatgtaggttaattgtaatgattttgtgaacagcctatactgccgccaggtctccggaacaccctgcaatcccgagccacccagcgttgtaacgtgtcgttttcgcatctggaagcagtgttttgcatgacgcgcagttatagaaaggacgctgtctgacccgcaagcagaccggaggaaggaaatcccgacgtctccaggtaacagaaagttaacctctgtgcccgtagtccccagggaataataagaacagcatgtgggcgttattcatgataagaaatgtgaaaaaacaaagacctgttaatctggacctacagaccatccggttccccatcacggcgatagcgtccattctccatcgcgtttccggtgtgatcacctttgttgcagtgggcatcctgctgtggcttctgggtaccagcctctcttcccctgaaggtttcgagcaagcttccgcgattatgggcagcttcttcgtcaaatttatcatgtggggcatccttaccgctctggcgtatcacgtcgtcgtaggtattcgccacatgatgatggattttggctatctggaagaaacattcgaagcgggtaaacgctccgccaaaatctcctttgttattactgtcgtgcttagtcttctcgcaggagtcctcgtatggtaagcaacgcctccgcattaggacgcaatggcgtacatgatttcatcctcgttcgcgctaccgctatcgtcctgacgctctacatcatttatatggtcggttttttcgctaccagtggcgagctgacatatgaagtctggatcggtttcttcgcctctgcgttcaccaaagtgttcaccctgctggcgctgttttctatcttgatccatgcctggatcggcatgtggcaggtgttgaccgactacgttaaaccgctggctttgcgcctgatgctgcaactggtgattgtcgttgcactggtggtttacgtgatttatggattcgttgtggtgtggggtgtgtgatgaaattgccagtcagagaatttgatgcagttgtgattggtgccggtggcgcaggtatgcgcgcggcgctgcaaatttcccagagcggccagacctgtgcgctgctctctaaagtcttcccgacccgttcccataccgtttctgcgcaaggcggcattaccgttgcgctgggtaatacccatgaagataactgggaatggcatatgtacgacaccgtgaaagggagcgactatatcggtgaccaggacgcgattgaatatatgtgtaaaaccgggccggaagcgattctggaactcgaacacatgggcctgccgttcagccgtctcgatgatggtcgtatctatcaacgtccgtttggcggtcagagcaaaaacttcggcggcgagcaggcggcacgcactgcggcagcagctgaccgtaccggtcacgcactgttgcacacgctttatcagcagaacctgaaaaaccacaccaccattttctccgagtggtatgcgctggatctggtgaaaaaccaggatggcgcggtggtgggttgtaccgcactgtgcatcgaaaccggtgaagtggtttatttcaaagcccgcgctaccgtgctggcgactggcggagcagggcgtatttatcagtccaccaccaacgcccacattaacaccggcgacggtgtcggcatggctatccgtgccggcgtaccggtgcaggatatggaaatgtggcagttccacccgaccggcattgccggtgcgggcgtactggtcaccgaaggttgccgtggtgaaggcggttatctgctgaacaaacatggcgaacgttttatggagcgttatgcgccgaacgccaaagacctggcgggccgtgacgtggttgcgcgttccatcatgatcgaaatccgtgaaggtcgcggctgtgatggtccgtgggggccacacgcgaaactgaaactcgatcacctgggtaaagaagttctcgaatcccgtctgccgggtatcctggagctttcccgtaccttcgctcacgtcgatccggtgaaagagccgattccggttatcccaacctgtcactacatgatgggcggtattccgaccaaagttaccggtcaggcactgactgtgaatgagaaaggcgaagatgtggttgttccgggactgtttgccgttggtgaaatcgcttgtgtaagcgtacacggcgctaaccgtctgggcggcaacagcctgctggacctggtggtctttggtcgcgcggcaggtctgcatctgcaagagtctatcgccgagcagggcgcactgcgcgatgccagcgagtctgatgttgaagcgtctctggatcgcctgaaccgctggaacaataatcgtaacggtgaagatccggtggcgatccgtaaagcgctgcaagaatgtatgcagcataacttcagcgtcttccgtgaaggtgatgcgatggcgaaagggcttgagcagttgaaagtgatccgcgagcgtctgaaaaatgcccgtctggatgacacttccagcgagttcaacacccagcgcgttgagtgcctggaactggataacctgatggaaacggcgtatgcaacggctgtttctgccaacttccgtaccgaaagccgtggcgcgcatagccgcttcgacttcccggatcgtgatgatgaaaactggctgtgccactccctgtatctgccagagagcgaatccatgacgcgccgaagcgtcaacatggaaccgaaactgcgcccggcattcccgccgaagattcgtacttactaatgcggagacaggaaaatgagactcgagtttagtatttatcgctataacccggatgttgatgatgctccgcgtatgcaggattacaccctggaagcggatgaaggtcgcgacatgatgctgctggatgcgcttatccagctaaaagagaaagatcccagcctgagcttccgccgctcctgccgtgaaggtgtgtgcggttccgacggtctgaacatgaacggcaagaatggtctggcctgtattaccccgattagcgcactcaaccagccgggcaagaagattgtgattcgcccgctgccaggtttaccggtgatccgcgatttggtggtagacatgggacaattctatgcgcaatatgagaaaattaagccttacctgttgaataatggacaaaatccgccagctcgcgagcatttacagatgccagagcagcgcgaaaaactcgacgggctgtatgaatgtattctctgcgcatgttgtagtacctcttgtccgtctttctggtggaatcccgataagtttatcggcccggcaggcttgttagcggcatatcgtttcctgattgatagccgtgataccgagactgacagccgcctcgacggtttgagtgatgcattcagcgtattccgctgtcacagcatcatgaactgcgtcagtgtatgtccgaaggggctgaacccgacgcgcgccatcggccatatcaagagcatgttgttgcaacgtaatgcgtaaaccgtaggcctgataagacgcgcaagcgtcgcatcaggcaaccagtgccggatgcggcgtgaacgccttatccggcctacaagtcattacccgtaggcctgataagcgcagcgcatcaggcgtaacaaagaaatgcaggaaatctttaaaaactgcccctgacactaagacagtttttaaaggttccttcgcgagccactacgtagacaagagctcgcaagtgaaccccggcacgcacatcactgtgcgtggtagtatccacggcgaagtaagcataaaaaagatgcttaagggatcacgatgcagaacagcgctttgaaagcctggttggactcttcttacctctctggcgcaaaccagagctggatagaacagctctatgaagacttcttaaccgatcctgacagcgttgacgctaactggcgtaacacgttccagcagttacctggtacgggagtcaaaccggatcaattccactctcaaacgcgtgaatatttccgccgcctggcgaaagacgctagtcgttactctagtacgatctccgaccctgacaccaatgtgaagcaggttaaagtcctgcagctcattaacgcataccgcttccgtggtcaccagcatgcgaatctcgatccgctgggactgtggcagcaagataaagtggccgatctggatccgtctttccacgatctgaccgaagcagacttccaggagaccttcaacgtcggtagttttgccagcggcaaagaaaccatgaaactcggcgagctgctggaagccctcaagcaaacctactgcggcccgattggtgccgagtatatgcacattaccagcaccgaagaaaaacgctggatccaacagcgtatcgagtctggtcgcgcgactttcaatagcgaagagaaaaaacgcttcttaagcgaactgaccgccgctgaaggtcttgaacgttacctcggcgcaaaattccctggcgcaaaacgcttcagcctggaaggcggtgacgcgttaatcccgatgcttaaagagatgatccgccacgctggcaacagcggcacccgcgaagtggttctcgggatggcgcaccgtggtcgtctgaacgtgctggtgaacgtgctgggtaaaaaaccgcaagacttgttcgacgagttcgccggtaaacataaagaacacctcggcacgggtgacgtgaaataccacatgggcttcagctctgacttccagaccgatggcggcctggtgcacctggcgctggcgtttaacccgtctcaccttgagattgtaagcccggtagttatcggttctgttcgtgcccgtctggacagacttgatgagccgagcagcaacaaagtgctgccaatcaccatccacggtgacgccgcagtgaccgggcagggcgtggttcaggaaaccctgaacatgagcaaagcgcgtggttatgaagttggcggtacggtacgtatcgttatcaacaaccaggttggtttcaccacctctaatccgctggatgcccgttctacgccgtactgtactgatatcggtaagatggttcaggccccgatttttcacgttaacgcggacgatccggaagccgttgcctttgtgacccgtctggcgctcgatttccgtaacacctttaaacgtgatgtcttcatcgacctggtgtgctaccgccgtcacggccacaacgaagccgacgagccgagcgcaacccagccgctgatgtatcagaaaatcaaaaaacatccgacaccgcgcaaaatctacgctgacaagctggagcaggaaaaagtggcgacgctggaagatgccaccgagatggttaacctgtaccgcgatgcgctggatgctggcgattgcgtagtggcagagtggcgtccgatgaacatgcactctttcacctggagcccgtacctcaaccacgaatgggacgaagagtacccgaacaaagttgagatgaagcgcctgcaggagctggcgaaacgcatcagcacggtgccggaagcagttgaaatgcagtctcgcgttgccaagatttatggcgatcgccaggcgatggctgccggtgagaaactgttcgactggggcggtgcggaaaacctcgcttacgccacgctggttgatgaaggcattccggttcgcctgagcggtgaagactccggtcgcggtaccttcttccaccgccacgcggtgatccacaaccagtctaacggttccacttacacgccgctgcaacatatccataacgggcagggcgcgttccgtgtctgggactccgtactgtctgaagaagcagtgctggcgtttgaatatggttatgccaccgcagaaccacgcactctgaccatctgggaagcgcagttcggtgacttcgccaacggtgcgcaggtggttatcgaccagttcatctcctctggcgaacagaaatggggccggatgtgtggtctggtgatgttgctgccgcacggttacgaagggcaggggccggagcactcctccgcgcgtctggaacgttatctgcaactttgtgctgagcaaaacatgcaggtttgcgtaccgtctaccccggcacaggtttaccacatgctgcgtcgtcaggcgctgcgcgggatgcgtcgtccgctggtcgtgatgagcccgaaatccctgctgcgtcatccgctggcggtttccagcctcgaagaactggcgaacggcaccttcctgccagccatcggtgaaatcgacgagcttgatccgaagggcgtgaagcgcgtagtgatgtgttctggtaaggtttattacgacctgctggaacagcgtcgtaagaacaatcaacacgatgtcgccattgtgcgtatcgagcaactctacccgttcccgcataaagcgatgcaggaagtgttgcagcagtttgctcacgtcaaggattttgtctggtgccaggaagagccgctcaaccagggcgcatggtactgcagccagcatcatttccgtgaagtgattccgtttggggcttctctgcgttatgcaggccgcccggcctccgcctctccggcggtagggtatatgtccgttcaccagaaacagcaacaagatctggttaatgacgcgctgaacgtcgaataaataaaggatacacaatgagtagcgtagatattctggtccctgacctgcctgaatccgtagccgatgccaccgtcgcaacctggcataaaaaacccggcgacgcagtcgtacgtgatgaagtgctggtagaaatcgaaactgacaaagtggtactggaagtaccggcaagtgcagacggcattctggatgcggttctggaagatgaaggtacaacggtaacgtctcgtcagatccttggtcgcctgcgtgaaggcaacagcgccggtaaagaaaccagcgccaaatctgaagagaaagcgtccactccggcgcaacgccagcaggcgtctctggaagagcaaaacaacgatgcgttaagcccggcgatccgtcgcctgctggctgaacacaatctcgacgccagcgccattaaaggcaccggtgtgggtggtcgtctgactcgtgaagatgtggaaaaacatctggcgaaagccccggcgaaagagtctgctccggcagcggctgctccggcggcgcaaccggctctggctgcacgtagtgaaaaacgtgtcccgatgactcgcctgcgtaagcgtgtggcagagcgtctgctggaagcgaaaaactccaccgccatgctgaccacgttcaacgaagtcaacatgaagccgattatggatctgcgtaagcagtacggtgaagcgtttgaaaaacgccacggcatccgtctgggctttatgtccttctacgtgaaagcggtggttgaagccctgaaacgttacccggaagtgaacgcttctatcgacggcgatgacgtggtttaccacaactatttcgacgtcagcatggcggtttctacgccgcgcggcctggtgacgccggttctgcgtgatgtcgataccctcggcatggcagacatcgagaagaaaatcaaagagctggcagtcaaaggccgtgacggcaagctgaccgttgaagatctgaccggtggtaacttcaccatcaccaacggtggtgtgttcggttccctgatgtctacgccgatcatcaacccgccgcagagcgcaattctgggtatgcacgctatcaaagatcgtccgatggcggtgaatggtcaggttgagatcctgccgatgatgtacctggcgctgtcctacgatcaccgtctgatcgatggtcgcgaatccgtgggcttcctggtaacgatcaaagagttgctggaagatccgacgcgtctgctgctggacgtgtaatagtttaagtttcacctgcactgtagaccggataaggcattatcgccttctccggcaattgaagcctgatgcgacgctgacgcgtcttatcaggcctacgggaccaccaatgtaggtcggataaggcgcaagcgccgcatccgacaagcgatgcctgatgtgacgtttaacgtgtcttatcaggcctacgggtgaccgacaatgcccggaagcgatacgaaatattcggtctacggtttaaaagataacgattactgaaggatggacagaacacatgaacttacatgaatatcaggcaaaacaactttttgcccgctatggcttaccagcaccggtgggttatgcctgtactactccgcgcgaagcagaagaagccgctagtaaaatcggtgccggtccgtgggtagtgaaatgtcaggttcacgctggtggccgcggtaaagcgggcggtgtgaaagttgtaaacagcaaagaagacatccgtgcttttgcagaaaactggctgggcaagcgtctggtaacgtatcaaacagatgccaatggccaaccggttaaccagattctggttgaagcagcgaccgatatcgctaaagagctgtatctcggtgccgttgttgaccgtagttcccgtcgtgtggtctttatggcctccaccgaaggcggcgtggaaatcgaaaaagtggcggaagaaactccgcacctgatccataaagttgcgcttgatccgctgactggcccgatgccgtatcagggacgcgagctggcgttcaaactgggtctggaaggtaaactggttcagcagttcaccaaaatcttcatgggcctggcgaccattttcctggagcgcgacctggcgttgatcgaaatcaacccgctggtcatcaccaaacagggcgatctgatttgcctcgacggcaaactgggcgctgacggcaacgcactgttccgccagcctgatctgcgcgaaatgcgtgaccagagccaggaagatccgcgtgaagcacaggctgcacagtgggaactgaactacgttgcgctggacggtaacatcggttgtatggttaacggcgcaggtctggcgatgggtacgatggacatcgttaaactgcacggcggcgaaccggctaacttccttgacgttggcggcggcgcaaccaaagaacgtgtaaccgaagcgttcaaaatcatcctctctgacgacaaagtgaaagccgttctggttaacatcttcggcggtatcgttcgttgcgacctgatcgctgacggtatcatcggcgcggtagcagaagtgggtgttaacgtaccggtcgtggtacgtctggaaggtaacaacgccgaactcggcgcgaagaaactggctgacagcggcctgaatattattgcagcaaaaggtctgacggatgcagctcagcaggttgttgccgcagtggaggggaaataatgtccattttaatcgataaaaacaccaaggttatctgccagggctttaccggtagccaggggactttccacagtgaacaggccattgcatacggcactaaaatggttggcggcgtaaccccaggtaaaggcggcaccacccacctcggcctgccggtgttcaacaccgtgcgtgaagccgttgctgccactggcgctaccgcttctgttatctacgtaccagcaccgttctgcaaagactccattctggaagccatcgacgcaggcatcaaactgattatcaccatcactgaaggcatcccgacgctggatatgctgaccgtgaaagtgaagctggatgaagcaggcgttcgtatgatcggcccgaactgcccaggcgttatcactccgggtgaatgcaaaatcggtatccagcctggtcacattcacaaaccgggtaaagtgggtatcgtttcccgttccggtacactgacctatgaagcggttaaacagaccacggattacggtttcggtcagagcacctgtgtcggtatcggcggtgacccgatcccgggctctaactttatcgacattctcgaaatgttcgaaaaagatccgcagaccgaagcgatcgtgatgatcggtgagatcggcggtagcgctgaagaagaagcagctgcgtacatcaaagagcacgttaccaagccagttgtgggttacatcgctggtgtgactgcgccgaaaggcaaacgtatgggccacgcgggtgccatcattgccggtgggaaagggactgcggatgagaaattcgctgctctggaagccgcaggcgtgaaaaccgttcgcagcctggcggatatcggtgaagcactgaaaactgttctgaaataaatatctgtaataagaaatagccctcgccgcttccctctacaggaatggcgaagggctgtcggtttcgacatggttggccatcgtatgatggccttttttgtgcttatcggctactttttcgctgcgctatcagggtaaatttatagtcatcggtattaaaagcgttgcggctatattcaaacacccgaccatcaactaaatatccacggcttactttttcaagaatcggctttgtctggctgatattaagcagacggctcatctcttcggttggcatcagaggaatgatttcctgttcgctacgatcgataaccattttcttcacttcttcgataaagtgatatttgctattttccatgacctgccaggtgagatccgggaacaacgcaagcggcatccaggtttcttccagcgccattggcttttgcttgcgatagcgcacgcgcttcacatgccacacacgatcctgcggggtgatttgtagctgttgctgaagaaaatcgtcagccggaatcacttcgaatatcagaacttcactgtgtgtatcgacgtgacggtcgctcagtttttcatcaaaactggttaactgaaaaatatcgtaattgacccgctcttctttgacgtaagtcccgctgccctgaatgctttcgaggatctgctgctcgactagctggcgcaaagcctgacgcaccgtaacccggctgacgccaaactctgtttgtagcgcactttcagtgggtaacgcatcgccaggtttaagctcgccacgcgcaatttgttcacgaatgcgatcggcaatctgccggtataagggcttgtgtcccatttttagtatctcattaatacgaatttaaccattatgcccgataaattcatcctgtaaataatacaaatacaatacaaataatttcaatcaagtgaaattgatcacataatggtattgttttatcgggcacactggcgcgactataaaaacgatcaagtgaggatcatgatgaatctgacgactctgacccaccgcgatgcgttgtgtctgaatgcgcgctttaccagccgtgaagaggccatccacgcgttgactcaacgtcttgctgctctggggaaaatttccagtactgagcaatttctggaagaagtgtatcgccgtgaaagccttggcccgaccgccttaggtgaagggttggctgtgccgcatggcaaaactgctgcggtaaaagaagcggcgtttgcggtcgccacactcagcgagccgcttcagtgggaaggcgttgatggcccggaagcagttgatttagtggtgctgctggcgattccccccaatgaagcgggtactacgcatatgcaactgctgacagcgctgaccacgcgccttgcggatgatgagattcgggcgcgtatacagagcgcgacgacgcctgatgagttgctcagcgcgctggatgacaagggaggcacgcaaccttctgcctctttttccaacgcgccaactatcgtctgcgtaacggcctgtccggcgggtattgctcacacctatatggctgcggaatatctggaaaaagccggacgcaaactcggcgtaaatgtttacgttgaaaaacaaggcgctaacggcattgaagggcgtttaacggcggatcaactcaatagtgcaaccgcctgtatttttgcggctgaagtcgccatcaaggagagtgagcgttttaatggcattcccgcgcttagtgtgcctgttgccgagccgattcgccatgcagaagcgttgatccaacaagcgcttaccctcaagcgtagcgatgagacgcgtaccgtacagcaagatacgcaaccggtgaaaagtgtcaaaacggagctgaaacaggcactgttgagcggaatctcttttgccgtaccgttgattgtcgcggggggcacggtgctggcggtcgcggtattactgagccaaatcttcgggctacaagatctgtttaatgaagaaaactcctggctgtggatgtaccgcaagctgggcggcgggctgctcggaattttgatggtaccggtgctcgcggcctataccgcctattctctggcagataaaccggcgttagcgccaggctttgcggctggacttgccgccaacatgatcggctccgggtttctcggcgcggtcgttggcggattgatagccggttacttgatgcgctgggtgaaaaatcacttgcgtcttagcagtaaattcaatggattcctgactttttatctctacccggtgctcggtacgttgggagcgggcagtctgatgctgtttgtggtgggggaacctgtcgcctggatcaataacagccttaccgcctggctgaacggtctgagtggaagtaacgcgctgttgctgggtgccattctcggttttatgtgttcctttgaccttggagggccagtgaataaagccgcttatgcattctgcctgggcgcaatggcgaacggcgtttacggcccgtatgccattttcgcctccgtcaaaatggttagcgcatttaccgtaaccgcttccacgatgctcgcaccgcgcctgtttaaagagtttgaaattgagaccgggaaatccacctggctgttagggctggcaggtattaccgaaggggcgatcccgatggcgattgaagatccgctgcgggttattggtagctttgtgctgggctctatggtaacgggcgctattgtcggtgcgatgaatatcggccttagcacacccggtgccggcattttcagcctctttttacttcatgataatggcgcgggcggtgttatggcggcaattggctggtttggcgcggcattggtgggggctgcaatcagcactgcaattctcctgatgtggcggcgtcacgcggttaagcatggcaactatctgactgatggcgtaatgccataaacaaaaaggaaacgacgatgaaagcagtatctcgcgttcacatcaccccgcatatgcactgggatcgagagtggtatttcaccaccgaagagagtcgtattctgctggtcaataatatggaagagatcctgtgccgactggaacaggacaacgaatacaaatattacgtactcgacgggcaaacggcgatcctcgaagattatttcgcggtgaaaccggaaaacaaagaccgtgtgaagaaacaggtagaagccggcaagttgattatcggcccctggtatacccagaccgataccacgattgtttctgcggaatccatcgtccgtaatctgatgtacggaatgcgtgactgcctcgcgtttggcgagccgatgaaaataggttatttaccagattcctttggcatgtccgggcaactgccgcatatctacaatggatttggcattacccgcaccatgttctggcgcggatgtagcgagcgccacggtactgataaaaccgagtttttgtggcaaagcagtgacggtagcgaagtgacggcgcaggtgctgccgctgggctacgccatcggtaagtacttacctgccgacgaaaacggattacgtaaacgcctcgacagttattttgacgtgctggaaaaagcgtctgtaaccaaagagattttgctgccgaatgggcatgaccagatgccattgcagcaaaatatcttcgaagtgatggataagctacgtgagatctaccctcaacgtaagtttgtgatgagccgctttgaagaggtatttgagaagatcgaagcgcagcgagataatctggcaaccctgaaaggggaatttattgatggcaaatatatgcgcgtgcatcgcaccatcggttctacgcgtatggatatcaaaattgcccacgcgcgtattgaaaataagattgttaatctgctggaaccgctggcaacactggcctggacgttgggttttgaataccaccacggcttgctggagaaaatgtggaaagagatcttaaaaaatcatgcccacgacagtatcggctgctgctgtagtgacaaagttcatcgcgaaatcgtcgcccgcttcgaactggctgaagacatggcggataatctgattcgtttctacatgcgcaaaattgccgacaacatgccgcagagcgacgccgacaaactcgtcctgtttaacctgatgccctggccgcgtgaagaagttatcaacaccactgtgcggctgcgcgccagccagtttaatttgcgggacgatcgcggtcagcctgtaccgtattttattcgccatgcccgtgagatcgatccaggcctaatcgatcggcaaatagttcattacggtaattacgatccctttatggagtttgatatacagatcaaccagattgtcccttctatgggctatcgcacgctttatatcgaagcgaatcagcctggcaacgtaattgcggcaaaaagtgacgctgaagggatactggaaaatgctttctggcaaattgcgctcaatgaggatggttctctgcaactggtagataaagacagcggtgtgcgctatgaccgggtattgcaaattgaagaaagctctgatgatggtgatgaatatgactatagtcccgcaaaagaagagtgggtaattaccgcagcgaacgcgaaaccgcaatgcgatattattcatgaagcctggcagagcagggctgttatccgctatgacatggcagtgccgctcaatttgagtgaacgcagcgcccggcaatccactggcagagtaggggtggtgttggttgtcactcttagtcataacagcaggcgtattgatgtggatatcaatcttgataaccaggctgacgatcatcgccttcgtgtcctggtccctacaccttttaacaccgacagtgttctggcagatacgcagtttggtagcctaacgcgccccgtgaacgacagtgcaatgaacaactggcagcaagaaggctggaaagaagcgccggttccggtatggaatatgctcaactatgttgccttacaggaagggcgtaacggcatggctgtctttagcgaagggttacgtgaatttgaagtcatcggtgaagagaagaaaacctttgccattacgttgctgcgtggcgtgggcttactgggcaaagaagatctgcttttaaggcctgggcggcctagcggaattaaaatgccagtcccggacagtcaactacgtggtctgctttcttgtcgcctaagtttattgagttataccggtacgccaaccgccgctggtgtagctcagcaggcgcgagcatggctgactccagtacagtgttacaacaaaatcccatgggatgtgatgaagctcaacaaagccggattcaacgtgccggaaagttatagtttgttgaaaatgcccccagtgggatgcctgataagcgcacttaagaaagctgaagaccgacaagaagtgattttacggctgtttaatccggctgaaagtgcaacctgtgatgcgactgttgctttcagtcgcgaggtgatttcttgcagtgaaacgatgatggatgaacacattaccaccgaggaaaatcaaggtagtaatctaagcgggccttttttacccggccagagtcggacgttcagttaccggcttgcctgaatagcaatcaaaccgaagccacatatgcgcggccagattgttgacaaagggcgctttgttcatgccggatacggcatgaacgctttattcggtctacaaaagcaggcaaattcaatatattgcagagatgatgtagacactggcaagcgtagcgcatcaggtaattttgcgtttatcttcactctcaagccacgtatatgtggctttatttttaacaaaataataaccctgggtgagttaattataatataattataagttaactaaatgttaatattggcggggtggatttatgcctttattagtaatcctgaaactctgcgtcgtattagccagtgaccaaaaaaagaattaaggtcaaccgtgctgtttttgcttcgtctctttttatctttaattgccaaccgaaactaatttcagccttataactcacacattttaaacataaatgtcactaaagttaccttattgaaacatgattaacataatttgtaggaattgatatttatcaatgtataagtcttggaaatgggcatcaaaaagagataaattgttctcgatcaaattggctgaaaggcggtaatttagctataaattgatcaccgtcgaaaaatgcaaatttgcttcaacaaaaacctgtttattgtaaggattttgcggcgtaatatatacgtgggatcaatttgagtttttattaacatgtttgcaacctttctttacgccgtttttgtgtgcattcacatggtatgatgaaagtgttcaaacaaatttctattggggcatgcgtgtgaccctttctaacggggttcactctcggagtcttcatgcgatgagcaaggagtcatgatgttagatatagtcgaactgagccgcttacagtttgccttgaccgcgatgtaccacttcctttttgtgccactgacgctcggtatggcgttcctgctggccattatggaaacggtctacgtcctctccggcaaacagatttataaagatatgaccaagttctggggcaagttgtttggtatcaacttcgctctgggtgtggctaccggtctgaccatggagttccagttcgggactaactggtcttactattcccactatgtaggggatatcttcggtgcgccgctggcaatcgaaggtctgatggccttcttcctcgaatccacctttgtaggtctgttcttcttcggttgggatcgtctgggtaaagttcagcatatgtgtgtcacctggctggtggcgctcggtagtaacctgtccgcactgtggattctggttgcgaacggctggatgcaaaacccaatcgcgtccgatttcaactttgaaactatgcgtatggagatggtgagcttctccgagctggtgcttaacccggttgctcaggtgaaattcgttcacactgtagcgtctggttatgtgactggcgcgatgttcatcctcggtatcagcgcatggtatatgctgaaaggtcgtgacttcgccttcgctaaacgctcctttgctatcgctgccagcttcggtatggctgctgttctgtctgttattgttctgggtgatgaatccggctacgaaatgggcgacgtgcagaaaaccaaactggctgctattgaagccgagtgggaaacgcaacctgcgcctgctgcctttactctgttcggcattcctgatcaggaagaggagacgaacaaatttgcgattcagatcccttacgcactgggcatcattgcaacgcgttccgtggataccccggttatcggcctgaaagagctgatggtgcagcatgaagaacgcattcgtaacgggatgaaggcgtactctctgctcgaacaactgcgttctggttctaccgaccaggcggttcgtgaccagttcaatagcatgaagaaagacctcggttacggtctgctgctgaaacgctatacgccaaacgtggctgatgcgactgaagcgcagattcaacaggcaaccaaagactccatcccgcgtgtagcgccgctgtactttgcgttccgtatcatggtggcgtgtggcttcctgcttctggcaatcatcgcgctctctttctggagtgtcatccgcaaccgcattggcgagaaaaaatggcttctgcgcgccgcgctgtacggtattccgctgccgtggattgctgtagaagcgggctggttcgtggctgaatatggccgccaaccgtgggctatcggtgaagtgctgccgacagctgtggcgaacagcagtctgaccgcaggcgatctcatcttcagtatggtgctgatttgcggcctgtataccctgttcctggtggcagaattgttcttaatgttcaagtttgcacgcctcggcccaagcagcctgaaaaccggtcgctatcactttgagcagtcttccacgactactcagccggcacgctaagacaggagtcgtcaaatgatcgattatgaagtattgcgttttatctggtggctgctggttggcgttctgctgattggttttgcagtcactgacggtttcgacatgggggtgggcatgctcacccgtttcctcggtcgtaacgacaccgagcgtcgaattatgattaactccattgcaccacactgggacggtaaccaggtttggctgatcaccgcgggcggcgcactctttgctgcctggccgatggtctatgccgctgcgttctccggcttctatgtggcgatgatcctcgtgctggcgtctttgttcttccgtccggtcggttttgactaccgctccaagattgaagaaacccgctggcgtaacatgtgggactggggcatcttcattggtagcttcgttccgccgctggtaattggtgtagcgttcggtaacctgttgcagggcgtaccgttcaacgttgatgaatatctgcgtctgtactacaccggtaacttcttccagttgcttaacccgttcggcctgctggcaggcgtggtgagcgtagggatgatcattactcagggcgcaacctatctgcaaatgcgtaccgtgggcgaactgcacctgcgtacccgtgcaacggctcaggtggctgcgctggtgacactggtctgtttcgcactggctggcgtatgggtgatgtacggtatcgatggttatgtcgtgaaaagcacaatggaccattacgcagcctctaacccactgaataaagaagtggttcgtgaagctggcgcatggctggttaacttcaacaacacgccaattctgtgggctattccggcactgggtgtggttctgccgctgctgaccatcctgactgcacgtatggataaagccgcgtgggcgtttgtgttctcctccctgacgctggcctgcatcatcctgacagccggtatcgcaatgttcccgtttgtgatgccgtccagcaccatgatgaacgcaagtctgacaatgtgggatgcaacttccagccagctgacgcttaacgtcatgacctgggttgcggtggttctggtaccgatcattctgctctacaccgcctggtgttactggaaaatgttcggtcgtatcaccaaagaagatattgaacgtaacacccactctctgtactaagtaaggagctaaaaatgtggtatttcgcatggattctgggaacgcttcttgcctgtagctttggggtaatcaccgcgctggcgcttgaacacgtcgaaagtggcaaagccggtcaagaagacatctgatgagtaagattatcgcgactttgtatgcggtaatggacaagcgccccctgcgggcgctttccttcgtgatggcgcttctgttagcaggatgtatgttttgggacccatctcgttttgccgcgaagaccagtgaactggaaatctggcatggtttattgctgatgtgggccgtctgtgctggtgtgattcacggcgtgggctttcgtccgcagaaggttctttggcaagggattttttgcccattgcttgccgatattgttctcattgtcgggctgattttcttcttcttttaaatcagaattctctttaaaaaattatgggccgctccaggcccataaatttttacgctcccttaacttgccctcattcccaaacctcaatcgcgcgcgtatagtagcagcgtttaaaagctctaacttttgttgcattaccgggatgtaaagtgaatacaacgctgtttcgatggccggttcgcgtctactatgaagataccgatgccggtggtgtggtgtaccacgccagttacgtcgctttttatgaaagagcacgcacagagatgctgcgtcatcatcacttcagtcagcaggcgctgatggctgaacgcgttgcctttgtggtacgtaaaatgacggtggaatattacgcacctgcgcggctcgacgatatgctcgaaatacagactgaaataacaagtatgcgtggcacctctttggttttcacgcaacgtattgtcaacgccgagaatactttgctgaatgaagcagaggttctggttgtttgcgttgacccactcaaaatgaagcctcgtgcgcttcccaagtctattgtcgcggagtttaagcagtgactgacatgaatatccttgatttgttcctgaaggctagccttctggttaaacttatcatgttgattttgattggttttagtatcgcatcttgggccattattatccagcggacccgtattcttaacgcagcggcgcgcgaagccgaagcgtttgaagataaattctggtctggaatcgaactctctcgcctctatcaagagagccaggggaaacgggataatctgactggtagcgaacaaatcttttacagcgggttcaaagagtttgtgcgcctgcatcgtgccaatagccatgcgccggaagccgtagtggaaggggcgagccgtgctatgcgtatctccatgaaccgtgaacttgaaaatctggaaacgcacattccgttcctcggtacggttggctccatcagcccgtatattggtctgtttggtacggtctgggggatcatgcacgcctttatcgccctcggggcggtaaaacaagcaacactgcaaatggttgcgcccggtatcgcagaagcgttgattgcgactgcaattggtctgtttgccgctatcccggcagttatggcctacaaccgcctcaaccagcgcgtaaacaaactggaactgaattacgacaactttatggaagagtttaccgcgattctgcaccgccaggcgtttaccgttagcgagagcaacaaggggtaagccatggccagagcgcgtggacgaggtcgtcgcgatctcaagtccgaaatcaacattgtaccgttgctggacgtactgctggtgctgttgctgatctttatggcgacagcgcccatcatcacccagagcgtggaggtcgatctgccagacgctactgaaagtcaggcggtgagcagtaacgataatccgccagtgattgttgaagtgtctggtattggtcagtacaccgtggtggttgagaaagatcgcctggagcgtttaccaccagagcaggtggtggcggaagtgtccagccgtttcaaggccaacccgaaaacggtctttctgatcggtggcgcaaaagatgtgccttacgatgaaataattaaagcactgaacttgttacatagtgcgggtgtgaaaagcgttggtttaatgacgcagcctatctaaacatctgcgtttcccttgcttgaaagagagcgggtaacaggcgaacagtttttggaaaccgagagtgagtaaggcaaccgaacaaaacgacaagctcaagcgggcgataattattagtgcagtgctgcatgtcatcttatttgcggcgctgatctggagtagcttcgatgagaatatagaagctagtgccggaggcggcggtggtagctccatcgacgctgtcttggttgatagtggtgcggtagttgagcagtacaaacgcatgcaaagccaggaaagtagcgcgaagcgttctgatgaacagcgcaagatgaaggaacagcaggctgctgaagaactgcgtgagaaacaagcggctgaacaggaacgcctgaagcaacttgagaaagagcggttagcggctcaggagcagaaaaagcaggctgaagaagccgcaaaacaggccgagttaaagcagaagcaagctgaagaggcggcagcgaaagcggcggcagatgctaaagcgaaggccgaagcagatgctaaagctgcggaagaagcagcgaagaaagcggctgcagacgcaaagaaaaaagcagaagcagaagccgccaaagccgcagccgaagcgcagaaaaaagccgaggcagccgctgcggcactgaagaagaaagcggaagcggcagaagcagctgcagctgaagcaagaaagaaagcggcaactgaagctgctgaaaaagccaaagcagaagctgagaagaaagcggctgctgaaaaggctgcagctgataagaaagcggcagcagagaaagctgcagccgacaaaaaagcagcagaaaaagcggctgctgaaaaggcagcagctgataagaaagcagcggcagaaaaagccgccgcagacaaaaaagcggcagcggcaaaagctgcagctgaaaaagccgctgcagcaaaagcggccgcagaggcagatgatattttcggtgagctaagctctggtaagaatgcaccgaaaacggggggaggggcgaaagggaacaatgctagccctgccgggagtggtaatactaaaaacaatggcgcaagtggggccgatatcaataactatgccgggcagattaaatctgctatcgaaagtaagttctatgacgcaagctcctatgcaggcaaaacctgtacgctgcgcataaaactggcacccgatggtatgttactggatatcaaacctgaaggtggcgatcccgcactttgtcaggctgcgttggcagcagctaaacttgcgaagatcccgaaaccaccaagccaggcagtatatgaagtgttcaaaaacgcgccattggacttcaaaccgtaatcgcgatgttgactgttcggacggtcaacatcaggcaccggttgccacggggttctggtagttttgtgtattttagtttgttaacattctgctaaattatcgtgggccatcggtccagataagggagatatgatgaagcaggcattacgagtagcatttggttttctcatactgtgggcaagtgttctgcatgctgaagtccgcattgtgatcgacagcggtgtagattccggtcgtcctattggtgttgttcctttccagtgggcggggcctggtgcggcacctgaagatattggcggcatcgttgctgctgacttgcgtaacagcggtaaatttaatccgttagatcgcgctcgtctgccacagcagccgggtagtgcgcaggaagtacaaccagctgcatggtccgcactgggcattgacgctgtagttgtcggtcaggtcactccgaatccggatggttcttacaatgttgcttatcaacttgttgacactggcggcgcaccgggtactgtacttgctcagaacagctacaaagtgaacaagcagtggctgcgttatgctggtcataccgccagtgatgaagtgtttgaaaaactgaccggcattaaaggtgcgttccgtactcgtattgcctacgttgttcagaccaacggcggtcagttcccgtatgaactgcgcgtatctgactatgacggttacaaccagtttgtcgttcaccgtagtccgcagccgctgatgtctccggcgtggagtccagacggttctaaactggcttatgtgaccttcgaaagcggtcgttccacgctggttattcagacgctggcaaatggcgctgtacgtcaggtggctagtttcccgcgtcacaacggtgcacctgcattcagcccagacggcagcaaactggcattcgccttgagcaaaaccggtagtctgaacctgtacgtaatggatttggcttctggtcagatccgccaggtgactgatggtcgcagtaacaataccgaaccgacctggttcccggatagccagaacctggcatttacttctgaccaggccggtcgtccgcaggtttataaagtgaatatcaacggcggtgcgccacaacgtattacctgggaaggtagccagaaccaggatgcggatgtcagcagcgacggtaaatttatggtaatggtcagctccaatggtgggcagcagcacattgccaaacaagatctggcaacgggaggcgtacaagttctgagctccacgttcctggatgaaacgccaagtctggcacctaacggcactatggtaatctacagctcttctcaggggatgggatccgtgctgaatttggtttctacagatgggcgtttcaaagcgcgtcttccggcaactgatggacaggtcaaattccctgcctggagcccgtatctgtgataataattaattgaatagtaaaggaatcattgaaatgcaactgaacaaagtgctgaaagggctgatgattgctctgcctgttatggcaattgcggcatgttcttccaacaagaacgccagcaatgacggcagcgaaggcatgctgggtgccggcactggtatggatgcgaacggcggcaacggcaacatgtcttccgaagagcaggctcgtctgcaaatgcaacagctgcagcagaacaacatcgtttacttcgatctggacaagtacgatatccgttctgacttcgctcaaatgctggatgcacatgcaaacttcctgcgtagcaacccgtcttacaaagtcaccgtagaaggtcacgcggacgaacgtggtactccggaatacaacatctccctgggtgaacgtcgtgcgaacgccgttaagatgtacctgcagggtaaaggcgtttctgcagaccagatctccatcgtttcttacggtaaagaaaaacctgcagtactgggtcatgacgaagcggcatactccaaaaaccgtcgtgcggtactggtttactaagagaattgcatgagcagtaacttcagacatcaactattgagtctgagcttactggttggtatagcggccccctgggccgcttttgctcaggcaccaatcagtagtgtcggcagtggcagcgtcgaagaccgcgtcactcaacttgagcgtatttctaatgctcacagccagcttttaacccaactccagcaacaactttctgataatcaatccgatattgattccctgcgtggtcagattcaggaaaatcagtatcaactgaatcaggtcgtggagcggcaaaagcagatcctgttgcagatcgacagcctcagcagcggtggtgcagcggcgcaaagtaccagcggcgatcaaagcggtgcggcggcaagtacgacgccgacagctgatgctggtactgcgaatgctggcgcgccggtgaaaagcggtaatgcaaacacggattacaatgcagctattgcgctggtgcaggataaatcccgccaggatgacgcaatggtggcatttcagaatttcatcaaaaattaccctgatagtacttacctgccaaacgccaattattggctgggtcagttaaactacaacaagggtaaaaaagatgatgcggcgtactattttgctagcgtagtgaaaaactatccgaagagtccaaaggctgcagatgcgatgtttaaagtcggcgtcatcatgcaggacaaaggtgacaccgcaaaagcgaaagccgtataccagcaggttatcagtaaataccctggtactgatggcgctaaacaggcacaaaaacgtctgaacgcgatgtaatgcataacacacgaccagaagtcgcattatttctggtcgtgtcgtgcgaatcataagcagttgagtgatctacatcgaaatttttgttgcgctcaagtctgaaatcagtaatatatgccgccgttgccacgggatatcaaacaaaccgaaagcaacgaaaaagtgggtcgttagctcagttggtagagcagttgacttttaatcaattggtcgcaggttcgaatcctgcacgacccaccaatcgctaaggtggaagcggtagtaaaacgtgaaggataacgttgcatgagcaacggcccgaagggcgagacgaagtcgagtcatcctgcacgacccaccactaacatagttagttgtagtatccagcgtagtatcgggtgattagctcagctgggagagcacctcccttacaaggagggggtcggcggttcgatcccgtcatcacccaccaccgggtcgttagctcagttggtagagcagttgacttttaatcaattggtcgcaggttcgaatcctgcacgacccaccagttttaacatcgaagacagatgttaagcgtgtaggataacgttgcgtcagcaacggcccgtagggcgagcgaagcgagtcatcctgcacgacccaccactaatgacggtgggttcggtggaagtagtttgtagtatccagcgcagtatcgggtgattagctcagctgggagagcacctcccttacaaggagggggtcggcggttcgatcccgtcatcacccaccactcgggtcgttagctcagttggtagagcagttgacttttaatcaattggtcgcaggttcgaatcctgcacgacccaccagttttaacatcaaactcagatgttaagcgtgaaggataacgttgcgccagcaacggcccgtagggcgagcgaagcgagtcatcctgcacgacccaccaatcttaaagattggccccgagtaaaaatctttcaggtaacacccgtatgggtcgttagctcagttggtagagcagttgacttttaatcaattggtcgcaggttcgaatcctgcacgacccaccaatttaaaggtggttactggtagagaacgtgaaggataacgttgcgttagcaacggcccgaagggcgagacgaagtcgagtcatcctgcacgacccaccatcctgaatgattaaggcagcataatcccgcaaggggtcgttagctcagttggtagagcagttgacttttaatcaattggtcgcaggttcgaatcctgcacgacccaccaatgtaaaaaagcgccctaaaggcgcttttttgctatctgcgatactcaaagattcgaacctgcagcaggtttgagttgagcgcagcgaaacaacggagccgctcgcggcgacggcccgaagggcgagcgaagcgagtcatcctgcacgacccaccaatgtaaaaaagcgccctaaaggcgcttttttgctattcaggcatcctcaatttcactttgtaaacctgatgacatcgtcagagcttactgtgcaagcaactctatgtcggtggaattaggcgtaaaatgacgcatcctgcacattaggcgtaattcgagtgacttttccccaccattcgactatcttgtttagcatataaaacaaattacaccgataacagcgaatattacgctaatgtcggttttaacgttaagcctgtaaaacgagatggtaagatgagcgtaatgtttgatccagacacggcgatttatcctttccccccgaagccgacgccgttaagcattgatgaaaaagcgtattaccgcgagaagataaaacgtctgctaaaagaacgtaatgcggtgatggttgcccactactataccgatcccgaaattcaacaactggcagaagaaaccggtggctgtatttctgattctctggaaatggcgcgcttcggtgcaaagcatcccgcttctactttgttagtcgctggggtgagatttatgggagaaaccgccaaaattctcagtccggaaaaaacaattctgatgccgacacttcaggctgaatgtagtctggatctcgactgccctgttgaagaatttaacgcattttgcgatgcccatcccgatcgtactgtcgtcgtctacgccaacacttctgctgcggtaaaagcgcgcgcagattgggtggtaactagtagcattgccgtcgaacttattgatcatcttgatagtttgggtgaaaaaatcatctgggcacccgacaaacatctggggcgttacgtgcaaaaacagacgggtggagacattctatgctggcagggtgcctgtattgtgcatgatgaatttaagactcaggcgttaacccgcttgcaagaagaatacccggatgctgccatactggtgcatccagaaagtccacaagctattgtcgatatggcggatgcggtcggttccaccagtcaactgatcgctgctgcgaaaacattgccacatcagaggcttattgtggcaaccgatcggggtattttctacaaaatgcagcaggcggtgccagataaagagttactggaagcaccaaccgcaggtgagggtgcaacctgccgcagctgcgcgcattgtccgtggatggccatgaatggccttcaggccatcgcagaggcattagaacaggaaggaagcaatcacgaggttcatgttgatgaaaggctgcgagagagggcgctggtgccgctcaatcgtatgctggattttgcggctacactacgtggataacgaataataaggcgtaacgttacgctttgggggaaagatggatttttttagtgtgcagaatatcctggtacatataccaataggggcaggcggttatgatctcagttggatcgaagcggtaggcacgatcgccgggttgctgtgtattggccttgccagtctggagaagatcagcaactacttctttggcctgatcaacgtcaccttgtttggcattattttctttcagattcagctgtatgccagcctgctattacaggtgtttttctttgccgcgaatatttacggttggtatgcgtggagccgacaaaccagtcagaacgaggcggagttgaaaattcgctggttgccattgccgaaggcactcagctggttggcggtttgcgttgttagcattggtctgatgacggtatttatcaatccggtgtttgcatttttgacccgcgtggcagtcatgatcatgcaagcattaggattacaggttgtgatgcctgaactgcaaccggacgctttcccgttctgggatagttgcatgatggtgttatctatcgtggcaatgattctgatgacgcgtaagtatgtggaaaactggctgttgtgggtgattattaacgtgattagcgtcgttatttttgcacttcagggcgtttacgccatgtctctggagtacatcatcctgacctttattgcgctcaacggcagccggatgtggatcaacagcgcacgtgaaagaggcagtcgcgcgctgtcccattaatggtgatgatgactatggccagacaccccttcattcaggtggcagtctggcccatgacaaggttgatattccatctgaatggtggcgtgctcaatctgatagtgatccatcaggtagtgttggatctgatccaacaaggcatcgtgatcgtgtggcgggatcacctgcacatgcaacgtcatcaccggcttctcgcctaccatccatacatgtacatggtgcacattgcggacttccgggatttcccggcacatacgacgcttcagttcagcgatatccaggcttaccggtgcaccttcaagtaattcattcacgctatctttcaacagtcgccacgcgctacgcagaaccagaaggctcaccagtatgctgagaatggggtcagcaggtgtccagccagtccagataataatcaacgcggcaataatagccccaacgctacccagcaggtccccgagcacatgcagtgccgctgctcgtacgttgaggtttttctcttcgctgccgtgatgaagtaaccagaaagaaagtatatttgccagcaacccagccacggcaattgccatcatcatgccgccctcgaccggacgcggcgtgcggaagcgttctatcgcctcccagacaatcaaaatggtaattaccacgagggctatggcattcacaaacgccgcgagcgtggtcagtcttagccaaccgaaagtgtggcgaatggtgggaggacgacgactaaattgcacggcgagtagggcgaaaagcagggcggcagtatcggtcaacatatgacccgcatcggccagcaatgccagagaaccagaaagaaaaccaccaacgacttctaccagcataaacccggcagtcacgccgaaagcatacaacaagcgacgagcattattatcttctggcaggtgactggacgtgtgactgtgactgtgcgccatgacgagtcatcccttaattattctcacttaactttatgacatcatactgcttttagaagtgaaaaattaaaagggagagactccgctctcccattattggctattttgcagggttactgcgtggtaccgtcggttttggtatcgacatcattattgatgccatcaccggtttgtacctttttattgatatccggacagcgaccatctttgcacatggtgttcttgtgctcttcatctttggtcattccgtcattgttcatactagaaccatcgctatgcagcattgtgccgccagaaccggtatttaccccgttattgtcgacgttatttggcgcgacattttcacgggcgtcaggggctacctggcccgcatcagctgcggcgtttgcctggccgttattagtttgcgctccgctatcggcagccagtgcggcaccgctggcaaggcttagagtggcagtcagaaataatgtggccagttttgtcattttcataggatgctcctgttatggtcgttatgtcggataacctcttccaacagtgcatttgcaggtgaatataaggcattggtttaagatttcagccaggttatgaaacgcagcagagaatcttgaaataattaacaaacaaaggagttacagttagaaattgtaggagagatctcgtttttcgcgacaatctggcgtttttcttgctaattccaggattaatccgttcatagtgtaaaaccccgtttacacattctgacggaagatatagattggaagtattgcattcactaagataagtatggcaacactggaacagacatgaattatcagaacgacgatttacgcatcaaagaaatcaaagagttacttcctcctgtcgcattgctggaaaaattccccgctactgaaaatgccgcgaatacggttgcccatgcccgaaaagcgatccataagatcctgaaaggtaatgatgatcgcctgttggttgtgattggcccatgcagtattcatgatcctgtcgcggcaaaagagtatgccactcgcttgctggcgctgcgtgaagagctgaaagatgagctggaaatcgtaatgcgcgtctattttgaaaagccgcgtaccacggtgggctggaaagggctgattaacgatccgcatatggataatggcttccagatcaacgacggtctgcgtatagcccgtaaattgctgcttgatattaacgacagcggtctgccagcggcaggtgagtttctcgatatgatcaccccacaatatctcgctgacctgatgagctggggcgcaattggcgcacgtaccaccgaaagccaggtgcaccgcgaactggcaagtgggctttcttgtccggtcggcttcaaaaatggcaccgacggtacgattaaagtggctatcgatgccattaatgccgccggtgcgccgcactgcttcctgtccgtaacgaaatgggggcatagcgcgattgtgaataccagcggtaacggcgattgccatatcattctgcgcggcggtaaagagcctaactacagcgcgaagcacgttgctgaagtgaaagaagggctgaacaaagcaggcctgccagcacaggtgatgatcgatttcagccatgctaacagctccaaacaattcaaaaagcagatggatgtttgtgctgacgtttgccagcagattgccggtggcgaaaaggccattattggcgtgatggtggaaagccatctggtggaaggcaatcagagcctcgagagcggggagccgctggcctacggtaagagcatcaccgatgcctgcatcggctgggaagataccgatgctctgttacgtcaactggcgaatgcagtaaaagcgcgtcgcgggtaaggtttaattgtcggatgcgccgtcagagtggcgtatccgatgaatcaccacaggcctgataagtcgcgcagcgtcgcatcaggcaatgtgctccattgttagcaacaaaaaagccgactcacttgcagtcggctttctcattttaaacgaatgacgtttacttcgctttaccctggtttgcaaccgccgctgctttcgctgcgatctcgtcagcattacccagataatagcgtttcagcggtttgaaattctcgtcgaactcatacaccagcggcacgccagtcgggatattaagctcaagaatctcttcttcgctcatgttatcaagatatttcaccagcgcacgtaaagagttaccgtgtgcagcgatgatcacgcgctcaccgctcttcatacgcggcagaatagtttcattccagtaagggatcacgcggtcaatggtcagcgccaggctttccgtcagcggcagttctttctcgctcagtttcgcgtaacgcggatcgtgacccggataacgctcatcatctttagtcagttccggcggagtcactgcaaaaccacgacgccactgtttcacctgctcgtcgccatacttttcagcagtttccgctttgttcagaccctgcaacgcaccgtagtgacgttcgttcagtttccaggatttctcaacgggcagccatgcctgatccagttcgtccagcacattccacagggtatggatagcgcgtttcagcacagaagtgtaagcaaagtcaaagctgtaaccttcctctttcagcagcttacctgctgcttttgcttcgcttacgcctttctcagacagatccacgtcgtaccaaccggtgaaacggttttctttgttccactgactttcgccatgacgaaccagaaccagcttagttacagccatatacttactcctcaaatcatcttttaatgataataattctcattatattgccgcgacgaagcaacagcaatgcttacgcataaccatagcgaaaatagtggcgcagtgtaaggttgttgtgaatattgagttgcaaatatgtcggtgtttgctggtgatttgaacaatatgagataaagccctcatgacgagggcgtaacattactcagcaataaactgatattccgtcaggctggaatactcttcgccaggacgcaggaagcagtccggttgcggccattcagggtggttcgggctgtccggtagaaactcgctttccagagccagcccttgccagtcggcgtaaggttcggttccccggctcggtgtgccgccgaggaagttgccggagtagaattgcagagccggagcggtggtgtagaccttcagctgcaatttttcatctgcactccagacatgcgccgccactttcttgccatcgcctttggcctgtaacaagaatgcgtgatcgtaacctttcactttgcgctgatcgtcgtcggcaagaaactcactggcgatgattttggcgctgcggaaatcaaaagacgttccggcgacagatttcaggccgtcgtgcggaatgccgccttcatcaaccggcagatattcgtccgccagaatctgcaacttgtgattgcgcacgtcagactgctcgccgtcaagattgaaatagacgtgattagtcatattcaccgggcaaggtttatcaactgtggcgcgataagtaatggagatacggttatcgtcggtcagacgatattgcaccgtcgcgccgagattacccgggaagccctgatcaccatcatcactactcagggcaaacagcacctgacgatcgttctggttcacaatctgccagcgacgtttgtcgaacccttccggcccgccgtgcagctggttaacgccctgacttgggctaagcgtcacggtttcaccgtcaaaggtataacggctattggcgatacggttggcataacgaccaatagaggcccccagaaacgcggcctgatcctgatagcattccgggctggcacagccgagcagcgcctcgcggacgctgccatcggaaagcggaatacgggcggaaagtaaagtcgcaccccagtccatcagcgtgactaccatccctgcgttgttacgcaaagttaacagtcggtacggctgaccatcgggtgccagtgcgggagtttcgttcagcactgtcctgctccttgacttggtttacaaacgtaaaaagtctctttaatacctgtttttgcttcatattgttcagcgacagcttgctgtacggcaggcaccagctcttccgggatcagcgcgacgatacagccgccaaatccgccgccggtcatgcgtacgccacctttgtcgccaatcacagctttgacgatttctaccagagtgtcaatttgcggcacggtgatttcgaaatcatcgcgcatagaggcatgagactccgccatcaactcgcccatacgtttcaggtcgccttgctccagcgcgctggcagcttcaacggtgcgggcgttttcagtcagtatatgacgcacgcgttttgccacgatcgggtccagttcatgcgcaacagcgttgaactcttcaatggtgacatcacgcagggctggctgctggaagaaacgcgcaccggtttcgcactgttcacgacgggtgttgtattcgctgccaaccagggtacgtttgaagttactgttgatgatgacgacagccacacctttgggcatggaaactgctttggtccccagactgcggcaatcgatcagcaaggcatgatctttcttgccgagcgcggaaattagctgatccatgatcccgcagttacagcctacaaactggttttctgcttcctgaccgttaagcgcgatttgtgcgccgtccagcggcagatgataaagctgctgcaatacggttccgaccgcgacttccagactagcggaagaacttaacccggcaccctgcggcacattgccgctgatcaccatgtccacgccgccgaagctgttgttacgcagttgcagatgtttcaccacgccacgaacgtagttagcccattgatagttttcatgtgcgacaatgggcgcatcgagggaaaactcgtcgagctgattttcataatcggctgccatcacgcgaactttacggtcatcgcgtggtgcacaactgatcacggtttgataatcaatcgcgcagggcagaacgaaaccgtcgttgtagtcggtgtgttcaccaatcaaattcacgcggccaggcgcctgaatggtgtgagtggcagggtagccaaatgcgttggcaaacagagattgtgttttttctttcagactcatttcttacactccggattcgcgaaaatggatatcgctgactgcgcgcaaacgctctgctgcctgttctgcggtcaggtctcgctgggtctctgccagcatttcataaccaaccataaatttacgtacggtggcggagcgcagcagaggcggataaaagtgcgcgtgcagctgccagtgttgattctcttcgccattaaatggcgcgccgtgccagcccatagagtaggggaaggagcactggaagaggttgtcataacgactggtcagctttttcaacgccagcgccagatcgctgcgctgggcgtcggtcaaatcggtgatccgtaaaacgtgggctttgggcagcagtagcgtttcgaacggccaggcagcccagtaaggcacgacggctaaccagtgttcggtttcgacaacggtacggctaccgtctgccagctcgcgctgaacataatccaccagcattggacttttctgttcggcaaaatattctttttgcaggcggtcttcgcgctcagcttcgttaggcaggaagctatttgcccaaatctgaccgtgcggatgcgggttagagcagcccatcgccgcgcctttgttttcaaaaacctgcacccatgggtacgttttccccagttctgcggtttgctcctgccaggttttgacgatttccgtcaatgctgcaacgctgagctctggcagcgttttactgtgatccggactaaagcagatcacccggctggtgccgcgcgcgctctggcaacgcatcagcggatcgtgactttctggcgcatctggcgtgtcagacatcaaagccgcaaagtcattagtgaaaacgtaagtcccggtgtaatcggggtttttatcgcctgtcacccgcacattacctgcgcagaggaagcaatctggatcgtgcgcaggtaacacctgtttggctggcgtttcctgcgccccctgccaggggcgcttagcgcggtgcggactaaccagaatccattgcccggtgagcgggttgtagcggcgatgtggatgatcaacgggattaaattgcgtcatggtcgttccttaatcgggatatccctgtggatggcgactctgccagtgccaggtgtcctgcgccatttcatcgagtgtgcgcgttacgcgccagttcagttcacggtcggctttgctggcgtccgcccagtaggccggaaggtcgccctcgcgacgcggtgcaaaatgataattaaccggtttgccgcaggctttgctgaaggcattaaccacgtccagcacgctgttgcctacgccagcgccgaggttgtagatgtgtacgcctggcttgttcgccagtttttccatcgccacgacgtgaccgtccgccagatccattacgtggatgtaatcgcgtacgccagtaccatcttcggtcggataatcgttaccaaaaatcgccaggctgtcgcgacggcctacagcaacctgggcgatgtatggcatcaggttattcggaatgccttgcggatcttcgcccatatcgccgctcggatgcgcgccaaccgggttgaagtagcgcagcagggcaatgctccagtccggctgggctttttgcagatcggtgaggatctgttccaccatcagcttgcttttgccgtaagggctttgcggtgtgccggtcgggaagctttcaacgtatggaattttgggctgatcgccataaacggtggcggaggagctaaaaataaagtttttgacgttagcggcgcgcatggcgctaatcaggcgcagagtgccgttgacattgttgtcgtaatattccagcggtttttgtacgctttcgcccacggctttcagcccggcgaagtggatcacggtgtcgatagcgtgatcgtgcaggatctcggtcatcaacgcttcgttacgaatatcgccttcaacaaacgttggatgtttgccgcctaaacgctcgataacaggcagtacgatgcgcttactgttacagaggttatcaagaatgatgacatcatgaccgttttgcagtaattgcacacaggtatgacttccaatgtaaccgctaccaccggtaaccagaactctcataattcgctccattaggcttatggtatgaaataaccatagcataacaaagatgcgaaaagtgtgacatggaataaattagtggaatcgtttacacaagaatttagccgttttttatgcgcgattaagtgattataaaacagagggtttatgaatgattgcgctttttatctgaaaaaagacgcggtttcatgcctgcatgcgtcgaaccgttggccggagagggtgctaaggccgcctccggcaaggtcagcactaccgactcaatatatttttgtcagcacatagcgatagagtccaccgtccggcacgaactcaagacgatgggtaatacaggcaggcgcatcttcagcgtggtggctaacaaacaacaattgcgtttcaccttcgctaatcagcacatcaacaaaacggcggataagctggcgattcagcggatcaagcccctgtagtggttcatcgagaataagcaacgtcggatgtttcaccagtgcgcggacaatcagcgccagacgctgctgtccccaggaaagactatggaacggagcgtcagccgtgcgtttatcaatgccgagaatatccagccactgctgcaccagtttttgctggcgatcgctaacggcctgataaatgccaatgctatcaaaatagccagaaagaatcacattacgcacggtagtgctgacccggtaatccagatgcaaactactgctgacgtaaccgatatgctttttgatatcccagatggtttcgccgctgccgcgacgtcgtccgaaaagcgtcaaatcgttgctgtaaccttgcggatgatcgccagtaaccaggcttaataacgtgctttttcctgcaccatttggcccgacaatttgccagtgttcgcctggattcacctgccagctaaggttattaagaatggggcgatcgttataagaaaccacgccattgttcagcacaatgcgcggttcgttggcgggtaaggcgtgacgtgcactaggttcatccggctccggcagttgcacaccttcaagctgttcactatgcgccagttgcgcgacgagtgcttgttggagcagttcctctttagcgccagtttccgctaacgtgcaatccgccagcacgccagcaaactggacaaactccgggatctcatcgaagcgattgagcaccagtaccagagtaataccggactgatgtaagctggcgagtcgctcagccagctgctgacgactggcaacatccaggccatcgaacggctcatcaagaatcaacaagtcaggctcgctcatcagcgcctgacacagcagggtttttcgcgtctcgccagtggaaaggtatttaaagcgtcggtcgaggagggcggtaataccgaactgctgcgccagttgcatgcaacgcggtgcatcctttacttcatcctgaatgatctcagccgtagtgcgtccggtgtcatcttcgccagggccgagcatatcggtgttattccgctgccattcgtcgctgacgagtttttgcaattgctcgaaggagagacgagtgatgtgggaaaactggctttgccgttcacctttcaaaagcggaagttcccccgccagcgcgcgggccagggcgcttttcccgcttccattgctaccgacaaacgcccaactatcacccgcgtttaacgttagctgaggcaattgcagcgtttttgtgtcgctaagacgaaacgtgccttgcaaaatttgcaagctactcattttatatcccactttgtgcagcgattactgacagggatacgtgtttcataacaaattgtcaacacgcttagcacagcgtggcgataatcacgctgtcggcattaaagtaggccgtgacattctgtccttgctgaagagaagtcgcttcatttaccggcactgtggcgcacagtgtttgcccgtcgggtagcgccattaatacttcgcactgctctgcgccgcgctcaatatgactaataatacccggtaattggttgtcagcgttttgcgcgaccgcctcgtcctgagtaatacctacccacggcgcttttagcaatatcaacacttctttgccttcatccagccccagacgcgcgccgctttgtgcggtaattgcgactttcaggcgtgtttttccgtcagccagtaagacatcaacatgctgttgaacgtcatcatgatcgcgggcggtgatggtaccgaaccactggttacgggcgctggtttgcagactaaaacgactgatcgcggccagcaggctgttcagcggcagggcgtcatcgtcacttaacacatcaaaggctttttgctggatttgcgccagtaagtcatagagctgaatcagtcgctgaccatagcgggtcagtactgcgccgccgccacctttaccgcctgttgcgcgctcgaccagaatatgctcacttaactgattcatctcgttaatggcatcccaggcgcttttatagctaataccggcatctttcgctccctggctaatggaaccggaaagcgcaatgtgttttagtaggctaatgcggcgcgggtcggcgaataatttttgttggagcttaagggtgagaaggatttcggcctgcataacaatgtcctggcaaaagtcttattgtgacggaaaacgaacgccacgcaaagctgaccgcacaaaaggggagtgcttttctgtgcttagcggttagaatagtctcatgactatatctggagttgaccatgttagagttattaaaaagtctggtattcgccgtaatcatggtacctgtcgtgatggccatcatcctgggtctgatttacggtcttggtgaagtattcaacatcttttctggtgttggtaaaaaagaccagcccggacaaaatcattgattccctgaatgcccgcttagtcgggcattttctttttctcaacttcctgcttttcctgccgatattttttcttatctacctcacaaaggttagcaataactgctgggaaaattccgagttagtcgttatattgtcgcctacataacgttacattaaggggttaccaatggctcgtaaatggttgaacttgtttgccggggcggcactctctttcgctgttgctggcaatgcactggcagatgaagggaaaatcacggtgttcgccgccgcaagtctgactaacgcaatgcaggacattgctacgcagtttaaaaaagagaaaggcgtggatgtggtttcttctttcgctagcagttctactctcgcccgtcagattgaagcgggtgcgcctgcggatctgtttatttctgccgatcagaaatggatggattatgcggttgataaaaaagcgatcgatacagctacgcgtcagacactgctcggcaatagcctggtcgttgtagcaccgaaagccagcgtgcagaaagatttcaccatcgacagcaaaaccaactggactagtctgctgaatggcggtcgcctggcggttggcgatccggaacatgttcccgctggcatttatgcaaaagaagcactgcaaaaactgggcgcatgggatacgctctctccgaaactggccccagcggaagatgttcgtggggcgctggcgctggtcgaacgtaacgaagcgcctctgggcattgtctacggttctgacgcagttgccagcaaaggggtaaaagtggttgccaccttcccggaagatagtcataaaaaagtggaatatccggttgctgttgtggaagggcataacaatgcgacagtgaaagcattttatgattatctgaagggaccgcaggcagcggaaatctttaaacgttacggatttacaatcaagtaatgatactgaccgatccagaatggcaggcagttttattaagcctgaaagtttcttccctggctgtgctgtttagcctgccgtttgggatcttttttgcctggttactggtgcgttgcacgtttccgggcaaagctctgctcgacagcgtactgcatctaccgctggtgttaccgcccgtggtcgtcggttacttattattagttagcatgggacggcgcggatttatcggtgaacgtctgtatgactggtttggtattaccttcgcctttagctggcgcggcgcggttctcgctgccgccgtcatgagctttccgctgatggtgcgggcaattcgtctggcgctggaaggggttgatgtcaaactggaacaggccgcaagaacactgggggccgggcgctggcgcgttttctttactatcacgttaccgctgaccttaccgggaattattgttggtacggtactggcttttgctcgttctctcggtgagtttggtgcaaccatcacctttgtgagcaacattcctggtgaaacgcgaaccattccttctgccatgtataccctgatccagacccccggcggggaaagtggagcggcgagactgtgcattatttctattgcgctggcgatgatctccctgttgattagtgaatggctggccagaatcagccgtgaacgggcggggcgctaatcatgctggaactgaatttttcccagacgttgggcaaccattgcctgactattaatgaaacgctgcccgccaatggcatcactgctatctttggcgtctccggtgccggaaaaactagcctgattaacgccatcagtggactgacgcgcccgcaaaaagggcggattgtcctcaatgggcgggtactaaatgatgccgaaaaaggtatctgcctgacgccggaaaagcgtcgcgttggctatgtttttcaggatgcgcggctgttcccgcattacaaagtgcgtggcaatctgcgctacggcatgagcaaaagtatggtcgatcagttcgataagctggtggcgcttttaggcattgaaccgttgcttgaccgtttaccaggcagcctgtccggaggcgaaaaacagcgcgtggcgattggtcgggctttgctgacagcaccggaattgctgttgctggatgaaccgctggcgagtctggatattccgcgtaaacgcgaactgttgccttatctgcaacggctgacacgggaaatcaacattccgatgttgtatgtcagccatagcctggatgagatcctccatctggcagacagagtgatggtactggaaaacggtcaggtgaaagcctttggcgcgctggaggaagtgtggggcagtagcgtgatgaatccgtggctgccgaaagagcaacaaagtagcattctgaaagtgacggtgcttgagcatcatccgcattacgcgatgaccgcgctggcgctgggcgatcagcatttgtgggtcaataagctggacgaaccgctgcaagctgcgctacgtatccgcattcaggcttccgatgtttctctggttttacaaccgccgcagcaaaccagcattcgtaacgtattgcgggcaaaagttgttaatagttatgacgacaacggccaggtggaagtggaactggaagtcggcggtaaaacgctgtgggcgcgtatcagcccgtgggccagggatgaactggcgatcaaacctggcctgtggctgtacgcgcaaattaaaagtgtgagcataaccgcctgattaaatcaggtggctataaatgaactgggcaatgctgtcggtggtgttatcaccaatcacaatgttggcgcgcgcttttaccgcgtcatcggcgttgcccatcgccacgcctgtaccagcggcttccagcatactgatatcattaaagttatcgccgaatgccacgacgttttccatgctccaaccttgcgcctcaacccatttcgtcaaacgtttacctttgctgttgccgccgcgtgcaatatcaacctgatcgtgccaggaccattcacactccagtcccagttcatgttcgacatgcttaccaaaatgctgcaattgcggcaggtcatcgtgcgtcagggcgaacttccatacggcgttaacttgttgcgccgtttcagccagagaagcgacttgtgtgaaagtcggacgctgttccggcggcagggtttgcgcccagttagatgtgcgaatgacatgcccggtcgggtgctcatagaccattgcatcatcgacatacatcagaccgtgaatgtggtgttcattcagcatctcaatgagttgcagggctttaataacgggcattgggtccgcttccagcacggtttttgcatgataatcatacaaataggtgccattacagcaaatagcaggtgtatccagcgccagcgcctgataaaaaggatgaatagcgacgtgatggcgacctgtgacgatgattaattgatagcctgcttcgcgagcgcgggccagggcttctatgctactaggaagcagggtctttttcggggtcaataaggtgccgtctaagtcgagagcaatcacgcgtgtggtcatggcgtattccagattaaggttaagaattttcgtctgcgcgaatggtacaccgataccactatcggacaaaattctgcgttttaattcagcattcaccgccaaaagcgactaattttagctgttacagtcagttgctaaatgcaaaggagcattcatgaagcaaacagtttatatcgccagccctgagagccagcaaattcacgtctggaatctgaatcatgaaggcgcactgacgctgacacaggttgtcgatgtgccggggcaggtgcagccgatggtggtcagcccggacaaacgttatctctatgttggtgttcgccctgagtttcgcgtcctggcgtatcgtatcgccccggacgatggcgcactgacctttgccgcagagtctgcgctgccgggtagtccgacgcatatttccaccgatcaccaggggcagtttgtctttgtaggttcttacaatgcgggtaacgtgagcgtaacgcgtctggaagatggcctgccagtgggcgtcgtcgatgtggtcgaggggctggacggttgccattccgccaatatcagtccggacaaccgtacgctgtgggttccggcattaaagcaggatcgcatttgcctgtttacggtcagcgatgatggtcatctcgtggcgcaggaccctgcggaagtgaccaccgttgaaggggccggcccgcgtcatatggtattccatccaaacgaacaatatgcgtattgcgtcaatgagttaaacagcagtgtggatgtctgggaactgaaagatccgcacggtaatatcgaatgtgtccagacgctggatatgatgccggaaaacttctccgacacccgttgggcggctgatattcatatcaccccggatggtcgccatttatacgcctgcgaccgtaccgccagcctgattaccgttttcagcgttagcgaagatggcagcgtgttgagtaaagaaggcttccagccaacggaaacccagccgcgcggcttcaatgttgatcacagcggcaagtatctgattgccgccgggcaaaaatctcaccacatcagcgtatacgaaattgttggcgagcaggggctactgcatgaaaaaggccgctatgcggtcgggcagggaccaatgtgggtggtggttaacgcacactaaccgctgatttacccggcgcagtctctcctgcgccggtgtattaacctatctcctgtaacgcgtgtctctggcgttcgacgatattggtccacaaattgtctttatcgtcagtccataaattaatcagcaaggcaaaaaagcgttctgctgctggagaaagtacggcatctttacggcgaattattcccaatgttcgacgtataacgggttccaccaatgggataccaataatgctagaatagggcgcatgaggcattgccaggccaggaagcgcgctaatccccagtcccgcctccaccagtcctaaactcgtgctaagatgacgcacttcgtaaaaccagtccagcttccagggcttgtcggccagctgttgttctatcaacagtcggttgccgctggaggagcgtacgccaatcattttgtaacccactaactcctgccattctacaagctgctttttggccaatggatggtcacgccgacaggccagcacgaacggctcgttgaccagtggggtaaaatcaatggaactatttgtgacgttgttcatgtttatgccaaagtcactttcgttacacagcacgctttccatgcaattattcgtgccttgttccagaatccgcactttaatattgggatacagctcattaaatttaccgattgccagcggtaaaaaataaaatactgcggtcggaatacacgctaacgtcaccataccacgatgataagcattcatatcacgaatattaaaaagcgtttcatcgaatttctttattaattcccgcgcctccgggagcaacctttttcctgcttttgttaacgtaaccttgcgagttgtacgctcaaatagttgaacatgtaaatcttcctccatcttttttattcttcgcgttaatgcaggttgcgtaatattgagtaatttagcggcattgttaaagctactggactctgccagtatgacaaatgccttcatactacttaattcatgcttcattattactccggaaaatggaaggctgctttttgggtggctggccgttaaaaattttaactgcatttagccaacttaaattaatgaaaaaatgttattaatcgttgagctaaagtcattagagatgctttgcccttaatgtaaccatatcgcaataagttatgtttttaaattgagggcattattatgaaaaaaataccctgcgtgatgatgcgaggtggaaccagcaggggcgcgttcctgttagcggaacatttacccgaagatcaaacgcagcgcgataaaatattgatggcaattatgggttccggtaacgatctggaaattgacggtattggcggcggtaatccactgaccagtaaagtcgccattattagccgttccagcgatccgcgtgctgatgtcgattatctgtttgcgcaggtaatcgttcatgagcaacgtgtcgataccacgcctaactgcggcaatatgctgtctggtgttggggcattcgccattgaaaatggtttgattgcagcgactagcccagttactcgcgtacgtatccgcaacgtcaatacgggtacgttcatcgaagctgatgtgcaaacgccaaatggtgttgtcgagtacgagggtagcgccagaattgacggcgtaccgggtactgccgcaccggttgcgctcactttcctgaatgccgctggaaccaaaaccggaaaagttttcccgactgataatcagattgattattttgacgatgtcccggtgacctgtatcgatatggcgatgccagtcgtcattattccggctgaatatctgggaaaaacaggttatgaattaccggcggaactggatgccgacaaagcattattagcccgcattgaatctatccgtctacaagcgggtaaagcaatgggcttaggtgatgtcagtaatatggttatccctaaacctgtgcttatttctccagcgcagaaaggcggggcaattaatgtgcgttattttatgccgcattcttgccatcgcgcgctggcgataaccggtgctattgctatttccagtagttgtgcattggaaggcaccgtcacccgacaaatcgtcccttctgtaggatacggcaatatcaatattgaacaccccagtggtgcgctcgacgttcatttaagtaatgaaggtcaggatgccacgacgttacgcgcatctgttattcggacgaccagaaaaatattttccggtgaagtttatcttccctgaaaaaattcgttgtcaggataaggacaatcaataaaggacttctgtatgagtcatacagaaagaacaggattttaaatgaataagaaaagcttatggaagctaattctgatattagcgatcccatgtattattggttttatgccagctccggcaggattaagcgaactggcgtgggtgctttttggtatttacctggcggccattgtggggctggttatcaagcctttcccggaacctgtcgtactgttaattgccgttgctgccagtatggtggtggtcggtaacttatccgacggtgcgtttaaaaccaccgccgtattaagcggttactctagtggtaccacctggctggtgttcagcgcgtttaccttaagcgccgcatttgtgaccaccggtttaggtaaacgtattgcctatctgctgattggtaaaatcggtaacaccacgctgggtctgggttacgttacggtattcctcgatctggtactggctccggcaacaccgtctaacaccgcgcgtgcgggcggcattgtgttaccgatcatcaacagcgtggcggtggctttggggtccgaaccggaaaaaagtccgcgtcgtgtcggacattacctgatgatgtccatttacatggtcaccaaaaccaccagctatatgttctttaccgcaatggcggggaacattctggcgctgaaaatgatcaacgacattctgcacctgcaaattagctggggtggatgggcgctggcagccggattgccgggcatcattatgctgctggtcaccccgctggtgatttacaccatgtatccaccagaaattaagaaggtggataacaaaaccatcgctaaagcgggccttgccgaactaggaccgatgaaaatccgcgaaaaaatgctgctcggtgtctttgtgctggcgctgctgggctggattttcagtaagtctctgggggttgatgaatccaccgtggcaatcgttgttatggcaaccatgctgctgctgggtatcgttacctgggaagacgtggttaaaaataaaggcggctggaataccttaatctggtacggcggtattatcggcttaagctccttattaagcaaagttaaattcttcgaatggttagctgaagtctttaaaaataacctggcatttgatggtcacggtaacgttgctttcttcgttattattttcctcagcattatcgtgcgttatttcttcgcttccggtagtgcctatatcgttgctatgttaccggtatttgccatgctggcgaacgtctccggcgcaccgttaatgttaaccgcgctggcactgttgttctccaactcctatggcggcatggttactcactatggcggcgcggcaggtccggtcatctttggcgtgggttataacgatattaaatcctggtggttggtcggtgcggtactgacgatattaaccttcctggtgcatatcaccctcggcgtgtggtggtggaatatgctgatcggctggaacatgctgtaaatattctcgtcatacttcaagttgcatgtgctgcgtctgcgttcgctcaccccagtcacttacttatgtaagctcctggggattcactcgcttgtcgccttcctgcaactcgaattatttagagtatatccatttattatctttctgcgcacttcacggtgcgcagatatctggagcatttgatgatcaagttatctgaaaaaggcgtgtttctcgccagtaataacgaaataattgccgaagaacatttcaccggcgaaattaaaaaagaagaagccaaaaaaggcactattgcctggtctattctctctagccataatacgtccggaaatatggataaacttaaaattaagtttgatagtttagcctctcacgatattacctttgttggtattgtacagaccgctaaagcgtccggtatggaacgtttcccgctgccgtatgtgctgaccaactgccataacagtctctgcgccgtcggcggcactattaacggtgatgaccatgtttttggtttaagcgcggcccagcgttatggcggtatttttgtgcctccgcatattgcggtcatccatcaatatatgcgtgagatgatggcaggcggcggcaaaatgatcctcgggagtgacagccacacccgttacggtgcattagggacaatggcagtcggtgagggcggcggtgagttggtaaaacagctgcttaatgacacctgggatatcgactatccgggcgtggttgcggtgcatctgaccggaaaacctgcgccgtatgtggggccacaggatgtggcgctggctatcattggcgcggtgttcaaaaacggttacgtcaaaaacaaagtcatggagttcgttggaccgggcgttagcgcgctctctaccgatttccgtaacagcgttgacgtgatgaccactgaaacgacctgtttaagttctgtctggcaaaccgatgaagaagtccataactggctggcgctgcacggtcgcggccaggattactgccagcttaaccctcaaccgatggcgtactacgatggctgcatcagcgttgatttaagcgccatcaaaccaatgattgcgctgccgttccacccgagcaacgtgtatgaaatcgacacactgaaccagaacctgaccgacattctgcgtgagattgaaattgagtccgaacgcgtggcgcacggtaaagccaaactcagcctgctggataaagtggaaaatggtcgcctgaaagtgcagcaggggattatcgcgggctgttctggcggtaactacgaaaacgtcatcgcggcggcgaatgcactgcgcggtcaatcctgtggcaatgacaccttcagcctggcagtttacccgagtagtcagccggtgtttatggatctcgccaaaaaaggtgtggtagcagatttgattggcgcaggcgcaatcatcagaaccgcgttctgcggcccatgctttggcgcgggcgatacgccaatcaacaacggtttgagtattcgccacaccacgcgtaacttcccgaaccgcgaaggctctaagccagctaatgggcagatgagtgcggtggcgttgatggacgctcgttctatcgctgcgactgcggcaaacggtggctatttaacctctgccagcgaacttgattgctgggacaacgtgccggagtacgccttcgatgtaacgccgtataaaaaccgtgtttatcagggctttgtgaaaggggcaactcagcaaccgctgatttacgggccgaacattaaagactggccggaattgggtgcgctgactgacaatatcgtcctgaaagtgtgcagcaagatcctcgacgaagtgaccaccaccgacgaactgattccttccggtgaaacctcttcttatcgtagtaatccgattggtctggcggagtttaccctgtctcgccgcgatcccggttatgttagcagaagtaaagcgactgctgagctggaaaatcagcgtctggcggggaatgtcagcgagctgacagaggtgtttgcgcgcattaagcagattgctggtcaggagcatattgatccgctgcaaactgaaattggcagcatggtctatgcggtgaaaccaggcgatggttctgcgcgtgaacaggcggcgagctgccagcgtgtgattggcggtctggcgaatattgccgaggagtacgcgactaaacgctatcgttctaacgtcatcaactgggggatgttaccgctgcaaatggcggaagtaccaacctttgaagtgggggattacatttacatccctggcattaaagcggcgctggataatccgggtacgacgtttaaaggttatgtgatccatgaagatgcgccggtaacggaaattacgctctatatggaaagtctgactgctgaagagcgcgagattatcaaggcgggtagtttgattaacttcaataaaaaccgtcagatgtaaaaagcgccatgtgaatgtaggtcgcattcggcacttattgtcggatgcgatgcttgcgcatcttatccgacctacgaatcgcatcgaatctgtaggccagataaggcattttcgcagcatccggcacttattgtcggatgcgatgcttgcgcatcttatccgacctacaaatcgcatcgaaccgtaggccggataaggcgtttacgccgcatccggcaaatagttaattgcccttacttcttcgcctctgcaaccactttactacccacgccgcggttattgtattcccacatgcggttgtagttagtgtcattcagattgcgctgtatttcgtcgttatcatctacgctgccggtattacccgcaaacggacgattagagatcaccgcatcggcccacggtttagccgtgttaaaaccttcgttgatggcgctatcacggatcaccacctgaccgttggtattggcatcaacatccaggctgcggcccagttgcgccacaccatcaccgaaagcattgaaacggctgtttacggcgaggaaaccgtagtaaatgttggacagcgtagccggtgcaaacacatacgcttcttgctgagtacgactgttcaccacgcggaattcggtgttatcgaacaccactgcgccgcgaccagaaacgatatccacatccccttcaatgtagctgttggtcaccagcgtacgcggctgacgattcgtttccagacggttctgcacaccgctgttggtgacaaagaaggtgttctgacgaccgagaatgttaacgttgttaatctgtacctggtcaccatcagtacgcagtgccaccgccggatggttacctgcatctacgctatcgcccagcgtgttttcgatggtcagattttgcagttgcaggccattgttttgactccagaagaccgcagagcagagaacaccgatactgtcgctgcgtttgctctggcagctatcgtacatataccacgctggtttacctggcatatatttgccgcgcgggttgacgtcgtgacgccagtcggcagggctcatgccaccattaagggaaagcccaatcttcacatcaatcggtttttcacctgtaccgtacagagtaattccacccggagcggcagggacatataccgttccctgatactcaccaggcatcacggcaatatactggcgcttgttggtacgcttgataattgccgcatctaccgccgcctgaatcgtggtatgcgttacaccttgagtgcccgccgggccgacaacaaagtcaggttgcgcaggcagggtaatcggggaaggattccacgctgcagcacctggtgtcagggatgcaaaatagtgttgagcatcgaaattctgcgcttcttttgcgctcagaatcgggcgagaagaggtaccaggcgcggtttgatcagaaggacgttgatcgggcggggtactgctacaggcggtcagcgtcacgccaaaagccaatgccagcgccagacgggaaacactaaatgtgttcacaggttgctccgggctatgaaatagaaaaatgaatccgttgaagcctgcttttttatactaacttgagcgaaacgggaaggtaaaaagacaaaaagttgtttttaatacctttaagtgataccagatggcattgcgccatctggcagagtgattaactaaacatcgcagtaatgctggcgcttgccagagagtggaaatgaacgttaaacccgaccatcgcgccgctggcaccttcatcgatatcaatacgttctatatccagcgcgtgaacggtaaaaatgtagcgatgagtttcgcctttcggcggtgctgcgccatcgtacccggttttaccaaagtcggtacgcgtctgcaaaacgccgtctggcattgctaccagaccagagccaaacccttgcggtaatacgcgggtatcagcgggtaagttaacaactacccagtgccaccagccggagccggttggcgcatccgggtcgtagcaggtgacaacaaaacttttcgttcccgcaggaacatcatcccacgccagatgcggactaatattatcgccatcgtaacccatgccgttaaagacatgacgatgcggcaatttatcgccatcgcgcagatcgttactgatgagtttcatgaaccctcctttcttgtttgcagaaagtgtagccagaaaccctcacgcggacttctcgttattggcaaaaaaatgtttcatcctgtaccgcgcggttaaccgctgcggtcagacgctgcaactgttgcgggagaataatatagggcggcatcaggtaaatcagtttgccaaaaggccggatccagacaccctgttcgacaaagaatttttgcagcgccgccatattcaccggatgagtggtttcgaccacgccaatggcccccagtacgcgcacatcggcaaccatttcggcatcacgggcgggggcaagttgctcgcgcagctgtacttcaatatccgccacctgttgctgccagtcgccagattcgagaatcgccaggctggcgtttgctgccgcgcaggccagcggattgcccataaaagttggcccatgcataaagcaaccggcttcaccgttactgatggtttctgcaacctcgcgcgtggtgagtgtggcggaaagggtcattgtgccgccggttaaggctttaccgaggcacaaaatgtccggcgcgatttctgcatgttcacaggcaaacagtttcccggtacgaccaaatccagtggcgatctcgtcggcaatcagcaagataccttcgcgatcgcatattttgcggattcgttttaaccattccggatggtacatgcgcatcccgcctgcgccctggacaatcggctcaatgatcaccgccgcgatttcatgacgatgcgccgccatcaggcgggcaaagcccaccatatcgcgctcatcccattcgccatccatgcggctttgcggggcgggagcaaacaggttttctggcaggtagcctttccacagactgtgcatactgttatccggatcgcacacgctcatcgcgccaaaggtatcgccatgataaccattgcggaaggtcagaaaacgctggcgcgcttcgcctttggcttgccagtactgcaacgccattttcatcgccacttccaccgctacggaaccggagtccgcgagaaaaacgcactccagcggttgcggcgtcatcgccaccagtttgcggcacagctcaatggctggcgcatgggtgataccgccaaacatcacatggctcatggcatcaatttggctcttcatcgccgcattaagctgcgggtgattgtagccgtggatcgccgcccaccaggagctcataccgtcaaccaggcgtctgccgtcagacaaaatcagctcgcaaccttcggcgctcaccaccggataaaccggcagaggggaggtcatggatgtgtatgggtgccagatatggcgttggtcaaaggcaagatcgtccgttgtcataatcgacttgtaaaccaaattgaaaagatttaggtttacaagtctacaccgaattaacaacaaaaaacacgttttggagaagccccatggctcaccgcccacgctggacattgagccaagtcacagaattatttgaaaaaccgttgctggatctgctgtttgaagcgcagcaggtgcatcgccagcatttcgatcctcgtcaggtgcaggtcagcacgttgctgagcattaagaccggagcttgtccggaagattgcaaatactgcccgcaaagcagccgctacaaaaccgggctggaagccgagcggttgatggaagttgaacaggtgctggagagcgcgcgcaaagcgaaagcggcaggaagcacgcgcttctgtatgggcgcggcgtggaagaatccccacgaacgcgatatgccgtacctggaacaaatggtgcagggggtaaaagcgatggggctggaggcgtgtatgacgctgggcacgttgagtgaatctcaggcgcagcgcctcgcgaacgccgggctggattactacaaccacaacctggacaccagcccggagttttacggcaatatcatcaccacacgcacttatcaggaacgcctcgatacgctggaaaaagtgcgcgatgccgggatcaaagtctgttctggcggcattgtgggcttaggcgaaacggtaaaagatcgcgccggattattgctgcaactggcaaacctgccgacgccgccggaaagcgtgccaatcaacatgctggtgaaggtgaaaggcacgccgcttgccgataacgatgatgtcgatgcctttgattttattcgcaccattgcggtcgcgcggatcatgatgccaacctcttacgtgcgcctttctgccggacgcgagcagatgaacgaacagactcaggcgatgtgctttatggcaggcgcaaacagcattttctacggttgcaaactgctggccacgccgaatccggaagaagataaagacctgcaactgttccgcaaactggggctaaatccgcagcaaactgccgtgctggcaggggataacgaacaacagcaacgtcttgaacaggcgctgatgaccccggacaccgacgaatattacaacgcggcagcattatgagctggcaggagaaaatcaacgcggcgctcgatgcgcggcgtgctgccgatgccctgcgtcgccgttatccggtggcgcaaggagccggacgctggctggtggcggatgatcgccagtatctgaacttttccagtaacgattatttaggtttaagccatcatccgcaaattatccgtgcctggcagcagggggcggagcaatttggcatcggtagcggcggctccggtcacgtcagcggttatagcgtggtgcatcaggcactggaagaagagctggccgagtggcttggctatagccgggcactgctgtttatctctggtttcgccgctaatcaggcagttattgccgcgatgatggcgaaagaggaccgtattgctgccgaccggcttagccatgccagtttgctggaagctgccagtttaagcccgagccagcttcgccgttttgctcataacgatgtcactcatttggcgcgattgcttgcttccccctgtccggggcagcaaatggtggtgacagaaggcgtgttcagcatggacggcgatagtgcgccactggcggaaatccagcaggtaacgcaacagcacaatggctggttgatggtcgatgatgcccacggcacgggcgttatcggggagcaggggcgcggcagctgctggctgcaaaaggtaaaaccagaattgctggtagtgacttttggcaaaggatttggcgtcagcggggcagcggtgctttgctccagtacggtggcggattatctgctgcaattcgcccgccaccttatctacagcaccagtatgccgcccgctcaggcgcaggcattacgtgcgagcctggcggtcattcgcagtgatgagggtgatgcacggcgcgaaaaactggcggcactcattacgcgttttcgtgccggagtacaggatttgccgtttacgcttgctgatagttgcagcgccatccagccattgattgtcggtgataacagccgtgcgttacaactggcagaaaaactgcgtcagcaaggctgctgggtcacggcgattcgcccgccaaccgtacccgctggtactgcgcgactgcgcttaacgctaaccgctgcgcatgaaatgcaggatatcgaccgtctgctggaggtgctgcatggcaacggttaataaacaagccattgcagcggcatttggtcgggcagccgcacactatgagcaacatgcagatctacagcgccagagtgctgacgccttactggcaatgcttccacagcgtaaatacacccacgtactggacgcgggttgtggacctggctggatgagccgccactggcgggaacgtcacgcgcaggtgacggccttagatctcagcccgccaatgcttgttcaggcacgccagaaggatgccgcagaccattatctggcgggagatatcgaatccctgccgttagcgactgcgacgttcgatcttgcatggagcaatctcgcagtgcagtggtgcggtaatttatccacggcactccgcgagctgtatcgggtggtgcgccccaaaggcgtggtcgcgtttaccacgctggtgcagggaagcttacccgaactgcatcaggcgtggcaggcggtggacgagcgtccgcatgctaatcgctttttaccgccagatgaaatcgaacagagcctgaacggcgtgcattatcaacatcatattcagcccatcacgctgtggtttgatgatgcgctcagtgccatgcgtagcctgaaaggcatcggtgccacgcatcttcatgaagggcgcgacccgcgaatattaacgcgtagccagttgcagcgattgcaactggcctggccgcaacagcaggggcgatatcctctgacgtatcatctttttttgggagtgattgctcgtgagtaaacgttattttgtcaccggaacggataccgaagtggggaaaactgtcgccagttgtgcacttttacaagccgcaaaggcagcaggctaccggacggcaggttataaaccggtcgcctctggcagcgaaaagaccccggaaggtttacgcaatagcgacgcgctggcgttacagcgcaacagcagcctgcagctggattacgcaacagtaaatccttacaccttcgcagaacccactagcccgcacatcatcagcgcgcaagagggcagaccgatagaaagtttggtaatgagcgccggattacgcgcgcttgaacaacaggctgactgggtgttagtggaaggtgctggcggctggtttacgccgctttctgacactttcacttttgcagattgggtaacacaggaacaactgccggtgatactggtagttggtgtgaaactcggctgtattaatcacgcgatgttgactgcacaggtaatacaacacgccggactgactctggcgggttgggtggcgaacgatgttacgcctccgggaaaacgtcacgctgaatatatgaccacgctcacccgcatgattcccgcgccgctgctgggagagatcccctggcttgcagaaaatccagaaaatgcggcaaccggaaagtacataaaccttgccttgttgtaaccattctgtatttggttaaattgcgagcgagatcgcgtcttcgattgactgcaatttaaccaattaaattctaaaataatcacgaaaaaaattttacttccgcctcatgcggcgaatgtgggaattgcccaggcggcgggggataggggctggagacagttatccactattcctgtggataaccatgtgtattagagttagaaaacacgaggcaagcgagagaatacgcggcttgcacgcgaattggcgttaaagacggctcaaagaaatatcttttattttttaactggttagataaatgcaatggcagtcactgaacaggcatctcttgccataaaactgtcatcactcatcttgacaaatgttaaaaaagccgttgctttggggataacccggtaaggccggagttttatctcgccacagagtaaattttgctcatgattgacagcggagtttacgctgtatcagaaatattatggtgatgaactgtttttttatccagtataatttgttggcataattaagtacgacgagtaaaattacatacctgcccgcccaactccttcaggtagcgactcatgagtaaaccgttcaaactgaattccgcttttaaaccttctggcgatcagccagaggcgattcgacgtctcgaagaggggctggaagatggcctggcgcaccagacgttacttggcgtgactggcagtgggaaaaccttcaccattgccaatgtcattgctgaccttcagcgcccaaccatggtacttgcgcccaacaaaacgctggcggcccagctgtatggcgaaatgaaagagttcttcccggaaaacgcggtggaatatttcgtttcctactacgactactatcagccggaagcctatgtaccgagttccgacactttcattgagaaagatgccagcgttaacgaacatattgagcagatgcgtttgtccgccaccaaagcgatgctggagcggcgtgatgtggttgtggtggcgtctgtttccgcgatttatggtctgggcgatcctgatttatatctcaagatgatgctccatctcacggtcggtatgattatcgatcagcgcgcgattctgcgccgactggcggagctgcaatacgctcgtaatgatcaagcattccagcgtggtactttccgcgttcgtggcgaggtgatagatatcttcccggcagaaagcgatgacattgcacttcgcgtggaactgtttgacgaggaagtggaacgattgagcttatttgacccgctgaccgggcagattgtttccactattccacgttttaccatctacccgaaaacgcactacgtcacaccgcgcgagcgcatcgtacaggcgatggaggagatcaaagaagagctggccgccagacgcaaagtgctgttggaaaacaacaaactgctggaagagcagcggctgacccagcgtacccagtttgatctggagatgatgaacgagctgggctactgtagcgggattgaaaactacagccgcttcctctccggtcgtggaccgggtgagccaccgccgacgctgtttgattacctgcctgccgatgggctgctggtcgtcgatgaatctcacgtcaccattccacaaattggcggcatgtatcgcggtgaccgggcgcgtaaagagacactggtggagtacggcttccgcctgccaagtgcgctggataaccgtccgcttaagtttgaagagttcgaagcattagcgccgcaaaccatctatgttagcgcgacgccgggtaattacgagctggaaaaatccggcggcgatgtggtggatcaggtggtgcgtccaaccggattgcttgacccgattatcgaagtgcggccggtggcgacacaggttgatgatcttcttagcgagattcgtcagcgagcggcaattaacgaacgcgtactggtcaccacactgaccaagcggatggcggaagatcttaccgaatatctcgaagaacatggcgagcgcgtgcgttatcttcacagtgatatcgacaccgtcgaacgtatggagattatccgcgacttgcgtctgggtgagttcgacgtgctggtagggatcaacttactgcgcgaaggtctggatatgccggaagtgagcctggtggcgatcctcgacgctgacaaagaaggcttcctgcgttccgaacgtagcttgatccagaccattggtcgtgcggcacgtaacgttaacggtaaagcgattctctacggcgataagatcaccccaagtatggcgaaagcgattggcgaaaccgaacgtcgccgtgagaaacagcagaagtacaacgaggaacacggaattacgccgcaaggcttgaacaagaaagtggtcgatatcctggcgctggggcagaacattgccaaaaccaaagcgaagggcagaggaaaaagccgcccgattgttgagccggataatgtgccgatggatatgagccctaaagcgttgcagcagaaaatccatgagctggaagggttgatgatgcaacacgcgcagaatctggagttcgaagaagcggcgcaaattcgtgaccagttgcatcagctgcgtgagctgtttatcgcggcaagctaacaggatagcgaagaagactgatgacaaacggaaaacagcctgatgcgctacgcttatcaggcctacattttctccgcaatatattgaatttgcgcggtttgtaggccggataaggcgttcacgccgcatccggcataaacaacgcgcactttgtcttcaataggaagccggaattttccttcggatttccgttaacctaaagcctgtaacgccttttccagcgcgttatgtaacaactggcggtcatgacgatacggaatatcgctggcctccagtacctcctggatcacaatccgctctttcaccgcgctgacatccacttttggcccgacgatgaccgcatcaatgacctttttaccaacatactgctccataattgccagcttgctttccagcttcaaattagccgcaggtaaactcaactcacgccccagattgccgatataaaccatcggcgctggcgtgcggcgtaatgcctgggcgatttccttcagcagcagaattggcatcaggctggtataaaaactgccaggcccaataatgatgagatccgcttcattgatagcgtgaaccgcctcacgcgttgcgggtacattaggcgttaacaataactcttgaatcggcgtagttaactggtcgatattgacctcgccgtaaacttcatgcccctgatcgtcaatcgccatcagatcaacaggatgctcactcattggaatcaaatgcgtatccactttcagcagattacgaattaaattgatggcttccagaggccgcacgctaaggtgatccagcgcctttaacatcaagtttccgagattatgaccggaaagttcgccattgccaccaaaacggtattcaaacatcgcggaggcgacgctcggttccgttatcagctggttgaggcagttgcgcatatcgccccaggcaatgccgccttcactacggcgaatacgccccgtgctgccaccattatcggtggtggtgacgatacccgttaaacgagaacccaaagagctaagactactgagaacgcgtcccagtccatgccctccgccgagagcaacgacacgatcaagatcagccagcgtacgattgcgcatatagtttcctggagtcagattatccgcgctacagtagcgcaaattgcggggaaacagcaattaacctgccaatattgaggatacaaactattttcttctacctctaaaggacgatgcacgctatgcctccctgatgatgtatatcaaagtaaaaccgccattttcccttattctgtagcgaaatagcacgatcatgacgctatatacatgattacatagcgaaagtgtggatggtaaaaatctcatttacacgctagtatcggcataaccactaaacactctagcctctgcacctgggtcaactgatacggtgctttggccgtgacaatgctcgtaaagattgccaccagggcgaaggaagaaatgacttcgcctcccgtatctggaaaggtgtacatggctagtcaactgactgatgcatttgcgcgtaagttttactacttgcgcctgagcattaccgatgtgtgtaactttcgttgcacctactgcctgccggatggctacaaaccgagcggcgtcaccaataaaggctttcttaccgtcgatgaaattcgccgggttacgcgcgccttcgccagactgggcaccgaaaaagtgcgcctgacaggaggagagccgtctttacgccgcgactttaccgatatcatcgccgctgtgcgggaaaacgacgctatccgccagattgcggtcacaaccaatggttaccgtctggaacgcgatgtggcgagctggcgcgatgcgggacttactggcattaacgtcagtgtcgacagtctggacgcccgccagtttcacgctattaccgggcaggataaattcaaccaggtcatggcagggattgatgctgcatttgaggccggttttgagaaggtcaaagtcaataccgtgctgatgcgtgatgttaatcatcaccagctcgacacctttctgaactggatccagcatcgccctatccagctgcgtttcatcgaactgatggaaacgggcgagggcagcgagctcttccgtaagcatcacatctctggtcaggttctgcgtgacgagctactgcgtcgcggctggatccaccaattacgtcaacgcagcgacggtcccgcgcaagtcttttgccatccagattacgccggagagattggccttatcatgccgtatgaaaaagacttctgcgccacttgcaaccgcctgcgcgtttcctccattggtaaactccatctctgcctgtttggtgaaggcggcgttaacctgcgcgatctgctggaagacgatacccagcaacaggcgctggaagcgcgtattagtgcggcgctgcgggagaagaaacagacccatttcctgcatcaaaacaacaccggtattacgcaaaacttaagctacattggcggctaaaacgtcaaaaggagagatcagatgagtcaggtaagcactgaatttatcccgacccgtattgctattcttacggtttctaatcgtcgcggtgaagaagacgatacctccggtcactatctgcgcgatagcgcgcaagaagcgggccatcacgttgtcgataaagccattgtgaaagaaaaccgctacgctattcgcgctcaggtatctgcgtggatcgccagcgacgatgtacaagtggtattgattacgggtggtactggcctgacggaaggtgatcaggctcccgaagcattgctgccgttgttcgaccgtgaagttgaaggttttggtgaagtgttccggatgttgagctttgaagagattggcacttccacgttgcaatctcgtgcggtagcgggcgtcgccaacaaaacgctgattttcgccatgccgggtagcaccaaagcgtgccgtaccgcatgggaaaatatcatcgcgccgcagctggatgcccgtacgcgtccgtgtaatttccatccacatttgaagaaataagtatgagccaactgacccatatcaacgccgctggcgaagcgcacatggtggatgtctccgccaaagcggaaaccgtgcgtgaagcgcgggcggaagcctttgtcaccatgcgcagcgagacgctggcgatgattattgatggtcgccaccacaaaggcgacgtatttgccactgcgcgtattgccggtattcaggcggcaaaacgcacctgggatctgatcccgctctgtcatccgctgatgctcagcaaagttgaagtcaatttacaggccgagccggagcacaatcgggtgcgtatagaaaccttatgccgcctgaccgggaaaaccggtgtcgaaatggaagcattaaccgcggcctccgtggcggcgctgaccatttatgacatgtgcaaagcggtgcaaaaagatatggtgattggtccggtacgtttgctggcgaagagcggcggcaagagcggtgactttaaggtggaagcggatgattaaagttctttttttcgcccaggtgcgcgagttggtgggaacagatgcaaccgaagtggctgcggatttcccaactgttgaagcgttacgccagcacatggctgcgcagagcgatcgctgggcgctggcgctggaagatggcaaattactggctgccgtcaaccagacgctggtgagttttgaccatccgctgactgacggcgacgaagtagctttcttcccgccggtaaccggaggttaagatggcagaaaccaaaattgttgttggtccgcagccgttcagcgtaggagaagagtacccgtggctggcggagcgtgacgaagacggtgcggtagtcacctttactggtaaggtgcgcaaccataacctgggcgacagcgtcaacgcattaaccctcgaacactatccggggatgactgaaaaagcactggcagaaattgttgatgaagcgcgtaaccgctggccgctggggcgcgtcactgtgattcaccgcatcggggaattatggccgggcgatgaaatcgtttttgtcggtgtcaccagtgcgcatcgcagcagtgcgtttgaagccgggcagtttattatggattatctcaaaacccgcgcaccgttctggaagcgcgaagccacgccggaaggcgaccgctgggttgaagctcgggagagcgatcagcaggcggcaaaacgctggtaattttttgttagccggataaggcaccgctgcgtccggcaatttcaccgctcagtacatacgtttacgctgcgtcgatgcacagcctcatcattttgcagtatccttaagatattccttatatcttcaggagatcgtcatggacagattcccacgttctgatagtatcgtacaaccccgggctggcttgcaaacttatatggctcaagtctatggctggatgaccgttggcttgttgctgaccgcatttgttgcctggtatgcggctaattccgcggccgtgatggagctgttgttcactaaccgtgtctttttaatcggtctgatcatcgcgcaattagcattggttattgtgttaagtgcgatgattcaaaagctgagcgcaggtgtaacgacgatgctctttatgctttatagcgcgctgacgggtcttacgctttccagtatattcattgtctataccgctgcttctatcgccagtactttcgtcgttactgccgggatgttcggcgcaatgagcctgtacggttacaccacgaagcgcgatttaagtggctttggcaatatgctgtttatggcgttaatcggcattgtgctggcaagcctggtcaacttctggttgaaaagcgaagcattgatgtgggcagttacctacatcggcgtgattgtctttgtcggattgacggcgtatgacacgcagaaactgaaaaatatgggtgagcagattgatacccgcgacacgagcaacctgcgcaaatattccattcttggcgcgttaaccttgtatctggacttcatcaacctgttcctgatgttgttgcggatcttcggcaaccgccgttaattctttttcaccatcactatcccggccatgtgtcgggatttttttcttactaaaaacgacacttaacaagtaccaggtataaaatatgccttatggacgagcggaagcgttttctgtatccataaatgcaaaagtattttgtatgcgtggttttaaatttattgatggtgaatattaatattttttctaaggataactaaaagaatggaaagttacagccaaaacagcaataaattagattttcagcacgaggccaggatattaaacggtatatggctcattaccgctttaggtttggtggcaaccgcaggactagcctggggagctaagtatatcgaaattacggcaaccaaatatgatagtccaccaatgtatgtcgccatagggttattattactttgtatgtatggcttaagtaaggatatcaacaagataaatgccgccatcgcgggcgtaatatatctgtttttactctctttggtggcgattgtcgttgcaagtttagttcctgtatatgccattatcatcgtgttcagcactgcgggcgcgatgtttttaatcagtatgctggccggtttattatttaatgttgatcctggttctcaccgttttatcattatgatgacgttgacagggttggccctggtaatcatcgtgaatgcggcattaatgagtgaacggcccatttggataataagttgcttaatgattgtgttatggagtggcattatcagccatggacgaaataagctccttgaattggcggggaaatgccatagtgaagagttgtggagtccggttcgttgcgcttttacaggtgcattaacactctattactattttatcggcttctttgggatacttgccgcgatagctataacgcttgtctggcaaaggcatacgcgtttttttcattaaccgtaaatgcacatactaaagaacttaactaaacttcacatcgccgcttcatttttcgcccgtagcttcttcgcctggctttccagcaacaggtaacagatcagcgccagcagcagtgggataaagtaatacagcacacggtaagcgagtagggcggcgataattgtacctttggaggtatgctccccagccagtagtgcgataaacaccgcttccagcacaccgatccccgccggaatatgcacgatgacgccagcaatactactaaccagtaacacgcccagtacaaagaaatagttcacgctttgaccaagtaacagccagataatcgcccccattaccatccagttaacgctggaaatcagcatctgagcgagggcgaatttccaactaggcagcaccagcttttgccctttgatggtcatatggcggtgcttcgcgaaagcgcaaaaccacaaataaaccgcgataatcatcagtaagccaatgccgagaatacgcagcgtagtttgatcgacataccagtgatccggcaactccaccacgcctgcggtaaagataatccctgccagtaaaatgtagcccagccagttggtggtaatactgaggctgaaaatccgcgtaatagtgctaccgggcaaccccagacgagagtacaaacgatagcgcataccaatgccgccgacccaggtactgagcgtcaggttgaaggcgtagcagataaagctcaccagcatcacctggcgcttcgccagtttgtgaccgcagtaaaagcgggcgagcaggtcatagcagccgtaaatcagatagctgacgaccaccagcccgaccgcactaagcagcgcaacgcgattgtagtcgcggatgaccttccagacctcttcccagtccacttttttggcgtagaccaccagcaacacaatcaccgcgataaaaaacagccaggtgaggatcttctttgctaagcgccagcgcgggtgacttttactcatcagggttttacccccgtgttttcagtttctacccgatcctgcgtttccattgtcggttgtgcgggcggatcaacctgcgccagacgtggcgtgtgtgccggaagccagccaaccagcgccgggaagtggcgtaaaaagtggaacgccagcacgcttttggtcaggttccaccaggtgcgtttgggcagcatggtttcatccacctgctgacaatctgcggcaataatgccgttcagattatcgcgcagcgtctggttaaaatgacgatcgtggatgatgacatttgcttcgagattcagactcaaactgagcggatcgagattactggaccctactgtcgcccagtgatcgtccatcaatgccactttgccgtggagcgggcggcggcggtactcaaaaacctgaacgccgcctttaaccagatagttatacagcaagcgcgcaccgactctgacaatcggcatatccggttcgccctgaatgatcagtttgatccgcaccccgcgccgtgccgctttacgcaaggcgtgtaaaaatcgatagccggggaagaagtaggcgttggcgataatcacttcccgccgcgcctgagtgagcattttcaaataatggcgttcaatatcatcgcgatgttcttcgttatcgcgccagaccagcaatacctgcgcttctcccggctggcggttctcttccgctttgtgatgacgtcgccaccagcgtcgtgccgcgctctgtccaggcaggttttccagctcaaactggagaatatcttcgacaatcggcccttcaaggcgtaccgcgtaatcctgtttagcctctggaccgtagctggacatatgctcggcggagtaattcagcccgccaataaaggctatacgcgcgtcgatcaccacaattttgcgatgcatccggcgaaacacattggtgcgcataccaaaaaggcgagggcggggatcgtagtagcggaacactacgccagctgccgtcagttcattgacaaactcatcgctgagatccgggctaccgtagccatccagcaagacttccgctttaaccccgcgttgcgctgctgccagtagtgccgcatgcagttgtttgccgacgtcatcctcaaaccagataaacgtttcaagaatgatgcgttcttgtgcctcgccaatcgccttaaacaccgcgggataatattgctcgccgttttccagcaactggatcttattgccttcgcgccagctacatttcataaatgaatctccgcacttaaaggggcatgatcagaaaggtgtcgccatgtccgcagcggcaacgcggttggcgcgctggcgctggcatttttgacgtagatcctgtccagtcgtagtagaggaaattgcaccggaaacgtgcgcgccgggcgtccgtgggcgcgggtaaaaatctcatccagtccggcctgcacttttaacggatgattagctttttgccgccagtcattgaaatcacccgccaccaataccggttcgccgtccggtagctcattcacccattcggcgagcatcgcaagctgcgcctgacggtgcgcctcacgcaggcccagatgtacgcacatcacatgaatcgcttttccggtcatcggcggcacaatgcggcagtagagcacgccgcgcttttccgcaccatcgacgctaacatcgcgattctcataatgttcaatgggataacggctcagtacggcgttgccgtgatgcccttccgggtatacggcattgcgaccgtaggcaaaatcgctccacatagtgtcggcgagaaactcgtagtggctggtatcgggccagttttccacatgcagcggatgaacttcgtgcgcgcccatcacttcctgcaggcaaacaatatcggcgctgacggtacgcacggcgtcgcgaagttccggcaaaatgaagcgtcggttaaacgcggtaaagcctttgtgaatattgatggtgagcaccttgaagctaaattgttgtgtttgatcgggcataattttcctgtctttgcctcttatctcattgaaatagtgtagtcggcgtcacaaaaaggtgcggtcttacggaattttccgtaaagttcggtactctgagtaagtagagataaattcttcaggagagaagccatgaagtggcaacaacgtgttcgtgtcgcaacgggtctaagttgctggcagattatgttgcatttactggtagtggcgctgctggtggtgggctggatgagtaagactctggttcacgtcggcgtgggattatgcgcactgtattgtgtcacggtagtgatgatgctggtgtttcagcgccaccccgagcaacgctggcgtgaggtggcagacgtgctggaagagctgaccacgacctggtattttggcgcagcgctgattgtgctgtggctgttgtcccgcgttctggaaaacaactttttgctggcaattgcagggctggcaatccttgccggcccggcggtagtgtctttgctggcgaaagataagaagttacatcaccttacgtctaaacatcgcgtacgccgctgattacatcaccttacgtctaaacatcgcgtacgccgcactccctgtcgtggccgttatcaccagtagcggccacaaactattccacacaatatccagactcgcatccttcaaataaatctgcttggtaatgtccgtaaagtggcgaatagggttaatccacgtcaggttttgcagccataccggcatgttttccaccggagaaacgtaaccggaaaggagaatggcgggcatcataaagacaaacacgccgataaacgcctgctgttgtgtactacagagactactaatcaacagaccgaatcccaccaggcttaaaccataaatcaccatcgtaaagtagaacagcgccaggcttccggcgaaggggatttgatacgcccagataccaatcgccagcacaatggtggcctggaaggtggcgacaattaacgccggtacggctttgccgatgaagatctgccaggtggtgagcgggctaaccagtagctgatcgagcgtaccttgttcacgttcgcgggcgacggaaagactagtgacgatcattacgccgatagtggtgatcatggcgatcagactcggcaccacaaaccatttgtagtcgagattcgggttataccagttgcgtaccaccagctcgctgttgttaggtttcggttttccttccagcagctcctgctgataatttttgacgatctgttgcaggtagttggcggcaatttgcgcactgttggagttacgcccgtcgaggatcaactgcaaaggcgcggtctggaaggtatccagtttgcggctgaagtcagccgggaaacgcaccagtagtaacgccttttgtgtgtcgatggttgggcggatctcctgtgggcttttcagcagcagcacatgagtaaaggcgctggcgcgggcaaaacgttgggtcagctccacgctatgctcgccgttatcttcatcgtagatggcgatggtggcgttagtcacttccagcgtggcggcgaacgggaacaggatcacctgaattagcacgggtaaaatcagaatcgcgcgggtttgcggttcgcgcagcaagctctgcaactctttgcggattaacgtccataagcgatgaaacatgctcttctccttaatccagccgacgtttggttttcagccacgtcaggccgataaacatcaccgcgctagcgatcaaaaacagcacgtttaccaccagcaccactggaatattcccggcgaggaacaggctttgcagggtgctgacgaaataacgagcgggaataatgtacgtcaccgcgcggatcaccgcgggcatactgtcgatctgaaaaataaagccggaaagcataatgctcggcagaaaagcggcgttcagggcgacctgagcggcattgaactggttgcgggtaatcgtggaaatcagcagccccatccccagggtactgagtaaaaacaggctggagataaaaaacagaatcagcaggctcccgcgatacggcacgccgagaataaacacactcaccagcatacacagcaacatcgccagcatcccgagaaagtaataagggatcagcttacacagcagcagttccgtgcgggtaatctccgtagagagcagagcctccatggtgccgcgttcccattctcgcgccaccaccaggctggtgagaatcgcgccgatgaccgtcatgataatggtcaccgcaccggggataatgaagtgctggctaatcgccgccgggttaaaccagtagcgggtttgtacatcaataagcggttcaaaagtctgcccgttgtcctccgctcgctgcatttgccagatctgccagatcccttcgacatacccctgtacaaagttagcggtattcggctcactgccgtcggtgatcacctgaatcggtgcggtggcgttggcgcgctccatctgttccgcaaaatccaccggaataaccaccagaccgcgaattttccccgcctgcattttggcgatcagttcctgacggttatcgctgatggtggcgtcgatgtaggggctaccggtcatggtgtgggtgaaatccagcgccgcttcgctacgctgttccagtaaaatcccgacccgcagcttgctggagtcgaggttaatgccgtaaccaaaaataaacagcagtagcagcgggatcactaccgcaatcagccagctactcggatcgcgaacgatctgccgcgtctctttaacgcacagcgcccgtacgcgacgccaggacaggatcgggttactcattgctatgctccttatcccagtcgtggatcaactgaataaaggcttgctccatggtgggatcgggttgctcatcgttagcgctctgtgctttcaaatcgtccggcgtgccgctggcgattaatttcccgcggtacaccaggccgatgcggtcgcaatattccgcttcatccataaagtgggtggtgaccatcaccgtgacgcctttctctaccatgctgttgatgtgcagccaaaattcacggcgggtgagggggtcaacgccggaagtcggttcgtcgagaaacagaatgtccggttcatgcatcaggctacaggccagcgccagccgctgtttaaaacctaatggcagttcatcggtggcgtgggaggcgatacttttcaggccgaacgcctcgctcatgcgggagattttttcgttctgcgcccgaccgcgtaagccatacacaccagagaaaaagcgtaaattctgttcgaccgtcaggttaccgtagaggctaaatttttgcgccatatagccgagatgctggcgcgctttaccggaactctctttcagatccatccccagcaccagcgcctggccggaagtcggcaccagcaaaccgcacatcatcttaaaggtggtgcttttacccgcgccgtttggccccagcaaaccaaaaatctccccacgtttaacggcaaagttgacgtgatcggtggcggcaaaatccccaaatttcttggtcagttctttcgcttcgatcaccgtctcgccgggtgtgccttctaccgtatgtaatattgcgcccagcgggctttcgctggttccggcaccgcccagcaaatcaataaacgcatcttcaaaacgcggcgtagtttcgttgatgttgatttccggcatcccgtcggcatggcgaatatcgtctggtgtggcctcttttttgaggatcagacgtacgcttttcccctgaatcatgccgtcgctgacctgcggcagtttcaaggcgcgttgcaacagtttgcggttgccctcgtgtggactggtcatcagaaagctgcgtccggccatggtttgtgtcagggcttttggttctccctgatacagcaactcgccttcgttcatcagtaacacgtcacggcactgctcggcttcgtcgagatagctggtactccagaggattaacatcccttcgcccgccagctcatgcaccatctgccacagttcgcgccgactgatagggtcaacgccgacgccgggttcatcgagcagcaacactttcggttcgcccaccagggtacaggccagaccgagtttttgtttcatcccaccggagagcttgcccgccaggcgtccggtaaacggcccaagagacgtaaactccagcaggcgagcaaaagtttgcttacgtgcctcgccggtgacgctgcgcaaatccgcgtacagattgaggttctccatcaccgtgagatcttcatacagaccaaatttctgcggcatataaccgagcacggcgtgcagcgcgccgtcgtttttgatcggatcaaagccaatcaccgtggcactgccgctgtcgggtttcagtaatcccgccaacatccgcatcagcgtggttttacctgcaccgtccggccccaccaaccccgtcacataaccggcgtgaatggtacaatcgagcggcgcgacggcgggcttgtccatgcccggaaagcgtttttccaggccgttcagcgtgataacggcatcattcatgtcctgcctcgtcaccgaattgtaccgtcactggcattccctggcgtaacgcatcatcggcgtcggtcaccacaatacgcaggcgatagacgaggtcggtacgcagatccggcgtttcgacggttttcggggtaaattcagcagtcgggctaacgaaaccaatctgcccgtgatacggcttgtccgggcgaccatcggtataaagcagcactttgcgccccggctgggcctggtcaagattacgttcatcaacataagcgcgcacccacaccggacgcgttagactaacggtaaacaccgtgccaccttcattgaggaccgtgcctggctccaccgcgcgcgttaacagcgtgccatcagacggggctatcaacgtactgtcctgtaaattcaactccgcctgcgccagttgcgcctgcgcctgttcgaggctggctttcgcctgagcgatgtcctgttcacggttaccggaacggtactgacgcaatttatcctgtgcacttttcagcgttgcctgcgcctggtcgcggctggagcgggcattttccaggtcatttgcgctaatagtgcggcttttccacaacccttgctggcggttatagaagttctgcgcatagtcataggcggcttgcgcctgtttcaccgctgcggcggcctgagcgatttcttcattgcgatacccggcaagcatcaggtcatactgcgcctgtgccacgctaacacccgctttcgcctgcatcagggcaatctcatacggcttgtgatccagttcgcccagcacctggcccgctttgatagcatcaccttcgtccaccgccaggctttcaacgcgccccccaacacggaaactaagatttaccgtacgaatatccacgttgccatacagcgtcaggccgttatcctggcggctttgataccaccagtagcctccggcaaccacggcggcaagtaccactaccgccaatccgatcacgacaggttttttcatcactacaaactcctttgcgataattacaaactcctttggcttaatccttgcaaaatcaggtcgatatgacaggtcaccgtctggttgatcagttcggtcttttcttcatcgaacgcggtccagccggtacgtaacagaattgtttctttgccaagacggaacgccagaatctcaccaatcaacgcatgggtatgaaggatcatgcgggtgtcattggcgtcgcagccggtccaggcggcaatcaggcgtgtcaggtggctgtgtagcggactaatcacctgttcgtgcaccaggtggtaggctgccgtgggagagagctgctcacgggagataaacttgctgaggttgacggtgtcatcctgggtgagcagcttaatcatgttcctgcaggcgcgaaggatcagttcacggatggcagcccgatcaggctgtggttgcgcgaacaagcgttcggcttcctcggcatgcggacggaactgctcgccaataaaatcggcaatccactgggcgcaggcgaggtacaaatcttctttgctaccgaagtagtaggtgatggcagcgatattctgcccggcctgggcggctatctcgcgagtggtggcgttcattccatattcaccaaactgcgccagtgcggcagcaatcagctgttttttcgcctgttcacccttgattgtcatggcaggattattcatcgcacagtccattcttaatcaaatgattgattaagattatgactccataggggagttgtccagtatggctaagaattttagcaacgccagtcacagggataatttatgcgctgcgtcacaaaaactgctacactccgctccctcatgacattgtggtttttgtcattttccttttcagtatctccctgaaaactacaccggtaacggtcggggcggttcggagtagttatgtctttcgattctttgggtttaagccctgatatcctgcgcgccgttgccgagcagggttaccgtgaacccacccctattcagcagcaggcgatccctgcggtgctggaaggccgcgacctgatggctagcgcccagaccggcaccggcaaaacagcgggctttacgctgccgctgttgcaacacctgatcactcgccagccgcacgccaaagggcgtcgtccggtacgtgcgctcattcttaccccgacccgtgaactggcggcgcagattggcgaaaacgtccgtgattacagcaaatacctgaacattcgtagcctggtggtgtttggtggtgtgagtattaacccgcagatgatgaaactgcgtggcggcgttgatgtgctggtggcaaccccgggacgtttgctggacctggaacatcagaatgcagtgaagctggatcaggttgaaatcctcgtcctcgatgaagctgaccgcatgctcgacatgggctttatccacgatatccgtcgcgtgttaacaaaactacctgcgaagcgccagaacctgttattctccgcgaccttctctgacgatattaaagccctggcggaaaaactgttgcacaacccgctggaaatcgaagtggcacgccgcaataccgcgtctgatcaggtgacccagcacgttcactttgtcgataagaaacgcaaacgcgaattgctgagccacatgattgggaaagggaactggcagcaggtgctggtgtttacccgtaccaaacacggcgctaaccatctggctgaacagctcaataaagatggcatccgtagtgcggcgatccacggcaataaaagccaaggtgcgcgtactcgtgcgctggctgattttaaaagcggcgatattcgtgtactggtggcaactgacatcgctgcgcgcggcctggatattgaagagctgccgcacgtcgtcaactatgaactgccaaacgtacctgaagattatgtccaccgtatcgggcgtaccggtcgtgcggctgctaccggtgaagcgttgagcctggtgtgtgttgatgaacacaaactgctgcgtgatatcgaaaaactgctgaaaaaagagatcccgcgcattgcgattccgggctatgagccggacccgagtatcaaagccgaaccgatccagaacggtcgccagcaacgtggcggcggcggtcgtgggcaaggtggtggtcgcggtcaacagcaaccacgccgtggggaaggtggcgcaaaatctgcaagcgcgaaacctgcagaaaaaccgtctcgccgcctcggcgatgccaaaccggcaggcgaacaacaacgtcgccgccgtccgcgtaaacctgccgctgcgcagtaatcttttatgccgggctatgcccggcatcaggctgatgaacaaacgcaaaactgcctgatgcgctacgcttatcaggcctacgtgaactctgcaatatattgaatttgcatgcttttgtaggccggataaggcgtttacgccgcatccggcatttcacaacaagcacttgtcagcaatttgagaacacgggaaaaaatttatctgttttaccgcccataagccaccgagacgttacttctctatagccaattgttcgcgcaactccattaaaaggtagcccagtcgattcttgcccttaccatgaccaccgtctccccagtaagcatcgttttccgtatgctcaaccagttttgcgggcgcggttgccagcaagagcgcacgcagttctgcatgctgttcgaatttagcgcgaagtgcttttcgcatcacctgttctttgacgctctcccagtttttacgcagaggcttagaacgatcgcgccccatgcgtgcggcgaccataggggaagaaacccgacggatctcttcgcggtatttttcatcaaggaatttttgtgcctgaaaatagtgttcactggtaggccaggttttcccgtcaaccttgatgggccaggcggcaaagttagaaaaatcaccgtagtcatcgctggtgctgtagaaatttatgatggtgtcttgcatgacgtgttggatcctttgtgctcgaacgggcattaaaccgcattatgttggtggttattgcgagccgctttccagaaacagaaaaaccattacccctgaaaaccgaaaaatgccacaatattggctgtttatacagtatttcaggttttctcatggcattaaccgccgcgcttaaagcgcaaattgccgcctggtataaggcgcttcaggaacagatccccgactttattccccgtgcgccgcagcggcagatgattgcggacgtcgccaaaacgctggccggagaagaagggcgacatctggcgattgaagcccccaccggcgttgggaaaacgctctcttatttgattcccggcatcgccattgcccgcgaagagcaaaaaacgctggtggtgagtaccgccaacgtggcattgcaggatcagatttacagcaaagatttaccgctgctgaaaaagatcattcccgatcttaaattcactgccgcttttgggcgtgggcgctacgtttgtccgcgtaatctgacggcgctcgccagtactgaacccacgcaacaggatctgctggcgtttcttgacgacgaactgacgccgaacaatcaggaagagcaaaaacgttgtgcgaagctgaagggcgatctcgatacttataaatgggatggtctgcgcgatcatactgatatcgctatagatgacgatctctggcgtcgtttaagtaccgacaaagccagctgcctcaaccgcaattgttactactatcgtgaatgcccgttttttgtcgctcgtcgggagattcaggaagcggaagtggtggtggcaaaccatgcgctggtgatggcggcgatggaaagcgaagcggtattgcctgacccgaaaaatttactgctggtgctggacgaaggccatcacctgccggatgtggcgcgggatgcgcttgagatgagcgccgaaatcaccgcgccgtggtatcggctacagctggacttgttcacgaaactggtcgctacctgcatggagcagtttcgcccgaagaccatcccaccgctggcgatccctgaacgtttgaatgcgcattgtgaagagttgtatgagcttatcgccagcttaaacaacattctcaatctctacatgcctgccgggcaggaggcagagcaccgttttgcgatgggcgaactgccagatgaagtgctggagatctgccagcggctggcaaaactcaccgagatgctgcgtggcctggcggagttatttcttaacgatttaagtgagaaaaccggcagccatgacattgtacgtctgcatcggttgattttgcagatgaaccgcgcgttggggatgttcgaggcgcaaagcaaactctggcggctggctagcctggcgcaatcttccggtgcaccggtgaccaaatgggcgacgcgggaagagcgcgaagggcagctacacctctggtttcactgcgtgggaatacgtgtcagcgatcagctggaaaggctgctgtggcgcagtattccgcacattattgtcacctccgcaaccttgcgtagcctgaacagttttagccgtttgcaggagatgagtggtctgaaagagaaagcgggcgaccgttttgtggcgctggattccccctttaaccactgcgaacagggcaaaattgttattccccggatgcgcgttgagccttccatcgacaacgaagagcagcatattgccgaaatggcggcctttttccgtaagcaggtggagagcaaaaaacatctcggtatgttggtactgtttgccagcggacgggcgatgcagcgctttctcgactatgtgacggatttacgtctgatgttgctggttcagggcgatcagccgcgttaccgtttagttgaactgcaccgcaaacgcgtcgccaacggtgagcgcagcgtgctggtgggcttacagagttttgccgaagggcttgatttgaaaggtgatctgctcagccaggtgcatatccacaaaatcgcttttccgcccatcgacagcccggtggtgatcaccgaaggggaatggctgaaaagcctcaaccgctatccgtttgaggtgcaaagcctgccgagcgccagctttaacctgattcagcaggttgggcgactgattcgaagccacggttgctggggcgaagtggttatctacgacaaacgcttgctgaccaaaaattatggcaagcgactactggatgcattaccggtatttccgatagagcaaccggaagtccctgaaggtatagttaaaaagaaagaaaaaacgaaatccccacgccgtcggcggcgttaatgatgtgagtcaggtaaggagtcgtaaatggactatcgcaaaatcattaaagagatcgggcgcgggaaaaaccacgcgcgcgatttagaccgggatactgcgcgcggtctgtatgctcatatgctcaatggtgaagtccctgaccttgagttgggcggcgtattgattgcgctgcgtatcaaaggagaaggggaagcagagatgctcggcttttacgaagccatgcaaaatcacaccatcaagctgacgccgccagcaggcaagccgatgccgattgtcatccccagttacaacggcgcgcgtaaacaggccaacctgacgccgttgttggcgattctcctgcacaaactcggttttcctgtggtggttcacggggttagcgaagatccaacccgcgtgctgactgaaaccatttttgaattgatgggtattacgccaacgttgcacggcgggcaggcgcaggcgaagctcgacgaacatcaaccggtgtttatgccagtcggcgcgttttgcccgccgctggaaaaacaactggcgatgcgctggcggatgggcgtgcgtaacagtgcacataccctggcgaaactggcgacgccatttgccgaaggtgaggcgctgcgtctttccagcgttagccatccggaatacattggacgcgtcgcgaagttctttagcgatatcggcgggcgggcgctactaatgcatggtactgaaggtgaagtgtatgctaatccgcagcgctgcccgcagatcaatctcattgaccgtgaagggatgcgggtgctgtatgaaaaacaggacactgctggtagcgagttactgccacaagcaaaagatccggaaaccacggcgcagtggattgagcgttgccttgctggcagcgaaccgattcccgaaagcctgaaaatccagatggcttgctgcctggtggctacgggtgaagcggcaactatcagcgacggcctggcgcgcgttaatcaggcattttaattcttttctcagccggatgagccatgtcatccggcttttaccccaccgcaatatgaaattcctgcatctttattgaccttcccacgcccggcgtgcagcataaaaatacaacaaacacataacataaacaggagttaaccatggaaagtggtcatcgctttgatgctcagacgctgcacagttttattcaggctgtatttcgtcagatgggtagcgaggaacaagaagcgaaattagttgccgatcatttaatcgcggcaaacctggcagggcatgatagtcatggtattggcatgatcccaagctatgtacgctcctggagtcaggggcacctgcaaattaaccatcatgccaaaaccgttaaagaggcgggggcggcggtcacgctcgatggcgatcgcgcatttggtcaggtcgcggcacatgaagcgatggcgctggggattgagaaagcgcatcagcacggtattgccgccgtggcgctacataacagccatcatatcggccgtatcggttactgggcggagcagtgtgcagcggcggggtttgtctctatccactttgttagcgtggtcggtattccaatggtcgcgccgttccacggtcgcgacagccgctttggcaccaatccgttctgtgtggttttccctcgtaaagataatttcccgctgttgcttgattacgccaccagcgccattgcatttggcaaaacccgcgtcgcctggcataaaggcgtccccgtgccgccaggttgcctgattgacgttaacggcgtgccgacgaccaatccggcggtaatgcaggagagcccgttgggtagcctgttgacctttgccgaacataaaggctacgcccttgcagcgatgtgtgaaattcttggcggggcgctttccggcggtaaaacgacgcatcaggaaacgttacaaaccagtcccgatgccattcttaactgcatgaccactatcatcatcaacccggaactcttcggcgcgccggattgtaacgcgcagaccgaagcctttgccgagtgggtgaaagccagcccgcatgatgatgataagccgattttgctaccgggcgagtgggaagtgaacacgcgtcgcgaacggcagaagcaggggattccactggatgcgggaagctggcaggccatttgtgatgcagcgcggcagattggtatgccggaagagacgttgcaggctttctgtcagcagttagccagctaaaaaaaaagcccgtccagtggcggacgggcaaacaagggtaacataggatcaatgagggttagagcatatgcgtctgtcggcaaacagacagggaaatacttgtgctggacgtagcgtaaacgcctgatccgtccaacggttcggattttgtaggcctgataagacgcggtagcgtcgcatcaggcatctgttgccggatgcggcgtaaacgccttatccgtcctacgaattacttataaattaccgcagtaccgcttaatttattgttgttggtggcggaagtgatgctgtatccactggcaccggctgccgcggctttctcagccagtttcgcttccagggcatcgagggtggatgcgccatcggcagaaaccacgccgattttattcatgttctgtgcctgggatgccgttaccggttccgccgcgaacacgccaaaactcagagtactaagagccatagcagcaacaacagtattgatagttttcataattaatctctcgcaggtgatttttgtataagtgacgttgtttcgtcgatgtgatgagtatcacgtttttttacgagagataaaatcgaagagaattgaccgccttgttcaaataaattgattgatatctaacctactgataaaccatttatttgttgtacttatgaacttgttttataccgcgtggcagtcacagcagcgttaaaggcacggaatgacacgcaaaatacaaattatactcgctatgcatctcgccagttgtagttaacgtaactggctgtctttgctacctctgcgattatatcctgtataagctggtttttgtaaatctttctcctgctgacaatgaatacataagcgcacgccaggaatggcttcccgacgggcctgcgggatgggggcaccgcactcttcacattcatccaggctttcgccgcgcggaatttcaccccgagcgcgggcaatcgcatcttcaattgtactgttgatctgttcgttgacggcgtcatcgttagcccaaccggatgccatatcgacctccccatatcaatacttgtacagttaagtgtagctaatccagggacgaactcgggcagttcaagcatcagatctcgctccattcccgcagcagattatgataaagattaagcaggctcaggatctcttcactttcgccgtagcggcttttcaggctctgaatattgttgtccagttcaaacagcatggcgcgctttttatcatcgcggatcatgctctggatccacataaaacttgccactcgtacgccgcgggttacgggtgtcacgcaatgcaggctgctggagggatacaacacgagatcgcctgccgggagttttacccgatgttgtccgaaggtgtcattaacgaccagttcgccgccgtcgtagctttgtggatcgcttaaaaacagcgtggcagaaaggtcagtacgcatccagccgttttgtggatggctgcgtactgcgccatccacatggaaaccataggtttcattgttctgatagcgattaaacagcggcgtggaaagggtacgcggcaaggccgcggcaaagaataaagcatgttggttaaccgcgttcagcacctcattttgcagggcggcgtataacgtgctgcgggtgtcgacctgttgattgttcttaacttgcgcaccttgtgcgccggtggtgacgcgtccatccacccattcggcttgttccagttgttcgcgaaaacgagcgacgtcctgtgggcttaacacgccgggaatgtggtacatcatacaatttctccaaaaagtggggcctgcgccccacatctgaatcagaaatgcatattggctgtgagcaagaaggttcttggctcgcccgggtgataacggtagccgctcttgttgatactggcgacgtaatcggtatcaaacaggttgtaaacgtttagctggaagtcgagattgcgattaactcgataccccagtttggcatcggcgacccagtaaccttcggtaaacgctggcgttcccaccgcgccgtcactacctttatgcatactgccgatatagcgtgcgcccgcgccaacagagatatcgtcggttgcctgatattggctccataaggtgaaggcgtgctccggggtatacggcaggctactggaaccatcctgggcaacatctttgccgtttttgatggttgctttttgctgggtatagccgccaatcacctgccacgcgggagtgatattcccggccacggatatctcatagccttcgacgcgtttcttaccgtattggctgtaagttccgtcatcattttgctcaacttcattttcgatatcagtgcggaacagcgcggcggtgagcaacagacgtttatccagaacctgccatttggtgccaatctcgctggtgttggctttttgcggtttaaaatcggtgcggttggcactgttaccgctgccagactgcgcaagggcgaagttgttgccgcccggaggctgctgggaaacggcatagttaatatagacattgccgttttccgtcaggtgatacagcgccccggctttccagttcatcagattgccgctcttggcggtgtcgacggtggtgaccggagaaccttttgccacaccagttgggcaggtgatggcaccgcgtccgctgccgccgcaggcggtggcactgtcatattcagtatgataattatccagacggatcccgccgttcagctcaaaatcacgggtgatttgcagcgtatcaaaggcgtaaattgcgaaggtatccgtctgaccattggcgtttgcgccgttgcgcgtcaggccgccgggatgaatgctgctgtcaggatgataaatatttaccgcgggtaacgtcaccggattaacgccgtagttagtctgcgtttcacgggtaaattccacgccggtactgacatcatgaccgatagaaccggtatagaacgtgctggtcaggttggtctggttggtgagaattttattactcacatctttggtattcgccgtgcgactccaggtccagctattcacatcgctggtgggctgagtaatattgctcgccccgcccataatcgccgtcatcaggtaatcctgctttacgcggctccaacgggtagtattgcgaatggtggtgttatcgttgatgtcgtgctcaaaacgcatggtggcggtgtcggtggtgctatcgtcgtaatcggaatccgtgccgtaaaagttatgagtatcaacttttccggaatgattcagggccgccgttcccgcagatggggcagaatagcccggcaaaccgatggtcggaatgccgccgtctggcgtgttgtgctgggtgacatgcagataattaagatacaaacgattcgctgtaccaaggccaaaagcgacagaaggggcgacgccgtaacgctcatttttgactttgtcgcgtccggcatcgtgcgttttttcgcccattacattcaggcgcaccgcggtggtatcaccaatgacctgattgacgtccagcgtgccgcggcggaaccaggcgctgccaatactggcggaggcgtcaatgccggaatcattgcgcggctgcttgctgatcatattgatgctgcctgtcggtgcgctgcgcccgtagtcggtgccggacggccctttaatcacttcgacctgctcggtattgaaggtgtcgcggctgacgctgccgatatcgcgaatgccatcaatataaatactgttagaggtatcggcaccacgcatataaatggcgtcgccagtggtggagttaccgttctcacccgcaaaaaacgcacccacgccggggacgtttttgagcgcgtcggtaaggttggttgcgccctgatctttaatcacttgttcagaaattaccgtcatcgtgcgggtagtatccgctaccggacggctgaatttcggatcggcagattgttgtggcgcataaaggctaggcgtacttgcttcgacaaccagcgtgtcatccgcgttagtttgcccttcggcggcgagtgcctgagccacaggcgtgatgccaatacaaagaccggcaaagaacgtgaggctatgaaattgtctggcagggaaattgcgattgttttccattttgcaggtgactttttcttatatgttgaaattttcactgccacgagaaagcctctctgcggatgcgatgccactgttaatcccgtgatagtgctcgtgaaagtgataataattttgataagcattatcacttggagcgattttctatcacccattgcgcgaaaaagaaatacatttatttacattgagttcatatttgatgttttttgattacaaaacagacgaaaactgcatccagaggcgaatgcagttacgttggtggggttatttgtagatggttgcagtaccgaacatctggtcatttccgcctgcggaattaatgacataacctttcgcgccttgttcgcgcgctttttctgccagtttatcctccagatcgcttaggttacttgcgccagttgcgctaacggtaccggcgggccgtagctgaccgctgtccaggttactcatcggttgcgcggcataagccgtgagagagattccgctcaggacggtggcaatcagtagtgtgaggcactttttcataatgacatcctcataaatacaacgggtagtgcctgataagtgtaggtcgcctgcgcgatgcaaatgacgcaaaaaattgacagagatgtgcttattttttgaacgatatatttttacaaaataagacaaatcaatgacatgcataatgctgatttttatgatgaattgccataaaccatagccatgttaaggttttggggaatgataaacgcagccagatatttaccctgtcgcgttatgcgggtatcttacgccgctgcttaaaggagaatgctatgtccgcccagaaaccggggttgcatccgcgcaaccgtcatcacagccgctacgatctcgccacgctttgtcaggtcaatcctgaactcaggcaattcctcacgcttacacccgccggggagcaaagcgtagactttgccaatccgctggcggtgaaggcgctcaataaggcgttgctggcccatttttacgccgtagcgaactgggatatccccgacggttttctctgcccaccagtaccgggccgggcggattatattcatcaccttgccgatttactggcagaagcaagcggaacaattccagcgaatgccagcattctggatatcggcgttggtgcgaactgtatttatccgctgattggcgtacatgaatatggctggcgttttaccggtagtgaaaccagcagccaggcgttaagcagtgcgcaggcgattatcagttctaatccggggcttaaccgcgccattcgtctgcgtcggcaaaaagagagtggggcgatttttaacggcatcatccataaaaacgagcaatacgacgcgaccttgtgtaacccgccattccacgattccgccgctgcggcacgggcaggtagtgagcgtaaacgccgtaacctggggctgaacaaagacgatgcactgaactttggcggccagcaacaggagttgtggtgtgaaggcggtgaagtcacctttatcaaaaagatgattgaagagagcaaaggcttcgcgaagcaggtgatgtggtttacaagtctggtatctcgtggtgaaaacttaccgccgttgtatcgtgccctgacggacgtgggcgcggtgaaggtggttaaaaaagagatggcccaggggcaaaagcagagtcgctttattgcctggacctttatgaacgacgagcagcgccgccgttttgtcaatcgccagcgttaaagcgttggttcccccggcggtaacggttcagccggggtcgcgcccggagcaggcagcacctgataagtctgcactggcgcgcgaacgcccgccaggtcgaaatgttttttcacctggctgtcgagggcaaagcgtaccgtccactgtttgagtggcagcgtggtgaagctaacacgcagtgtaaacgcggtattgcttaagccgacaatcccggcaaaattcggttcaccaataatcagcccgcgaatttcttcgttttccattaattccgctaccgcatctttcagtgcctgattggctttatcagcatcttcatggcgatcaacatcataatttgccaccacgctaccaatgccgcggacaaagttagcaaaggtggttatgctagaccacggaatgatgtgatacgccccggtatcctgtcgtacgcccacggagcgaatgctcatccgttccactgtgccggtcaacggcccgatagtcaccaaatctccagtgttcatgccgttttcaaactgaataaataccccggtgataatatctttcaccagcgtttggctaccaaagctgatagccagacctaatgccccggcacctgccagcaatggcgcgatattgacgccgatttcgctcaacacaatcatgatggtgatggtactgataatcaccgccagcgcgttacgaaacagcgtaagcagggtacgcgtgcgggcgctgggtagcgggcggccatgaatatcgctagccagccggttttcgatcaaactggcgagcaccgtccagccaaccgcgctgaagaaaagaatgagtgcgatacggatcaggatatctacggttttctgccccgcgccgttttgcagccagttccagaaatcgaacaatccccatgcgctcaacagcaacattaccgccacgcagactgtcagaatacgcgccgttttcagcgccgcgctcagccagccattcaaccgtttttgcagctccggatagttacgctgagtatgtgggctgagagtgatggttttcgccagccagcgggaaaacataccggaaacaaacgctgcgataccaataatcgccaggctgcgcaccgttgcacccatcataaatttcaggctgttgcccggatcgaacaagctaaagaaaaacagcacgataaaataggcgcttgccagccagtgccacaccagcgcaaaggcgcggataaacaggctgaaaaaggccaggctatgctccgcgaagttgagcaaatgctgggtaatctcttttttattacgaaagatcaggtacaacgcccagacggtcatgcacagcataatgatgacgttcgccagcgcacctatctgtacattcacctgattagagataatcggcacggccacaatcaggccataacctatcaaactgcttaaccagctcaggcgacgactccagtaacgggcgctctcgtcctgaatcgtgaacgggcgcagctccgccacgtttgggcaaaaaatcaggcgtagtacggctttgaaaaattcaatgagggcaaaggcgttgagaaacaaactttgttggaaagcgatggtgcgactgcctgcattcaggttgtcgcttaatacctggccgacaaataatgtcagggccagtaacagcaggtcgataataaacgccccgataatcatcgccggaagctgcaaccagttactgcgctcacgatttttttgccgcgcccactgacccattttgcgatacagcggcagtgcgcacaggcgaatcagccagtaaaaaccaaacactaataccgctaacatactaaaatgggtcagcgcattgctgaaggtttgtggattaaacggcttatgcggggagccggtgatattgcgataaagttgcccgaagcgggcggaaagggcttcaccataatggcggctgacttcggtgaccttttgcagcacggtttgctcttcgaccagcgtcggcggcactatttttggtaccggttcagcagggggcgtagcggcaacggtgcgcaactggtcgatcaactctttacggctggtgtcattatccagcacatccgccagtgcgccataggccgcttttttttgttcgatatccggttccggggccggttcagtcgtactgtccgttgtcgttgtggttgtaacgccgggtatggataccgcgtgggcaggtgcgcccagcaggcagaagaggatgaacaggatccaccgcatgactcctccagtgagaaaatagagcaaaaagataagtatagatgctggaggaggggcgattttaaatgagaggaatctggtgtgcctccctttcgggtgaaagggaggaagggatattaagcaggttgctgacaacgtgcgggcttttttgccggatgcggcgtgaacgccttatccgtcctacaagttcatgcaattttaataagttgccagatatcctgtaggcctgataagcgtagcgcatcaggcaatgtgtcttattaagagacgtgctgcaaaaattcctgcaagcgctggctcggcgggttcttgatcaacacctgcggattgccatcttccgcaatccggcctttgtcgataaagatcagccggctagctactttctcggcaaaaccgatttcgtgggtcacgatcaccatcgtcatcccttcttcagccagatcctgcataaccttcagcacttcatggcgcagttccgggtcaagagcggaagtcggttcatcaaacagcatcattttcggcttcaccgccagcgcgcgggcaatcgccacacgctgctgttgaccaccagaaagttcggaagggtagtgatgtgcacgttctgccagaccgactttcgccagcagctcacgtgccagtttttccgcctcttctttgttcgcgccacgcacgcgtagcgggccaaacatgacgttttccagcgctgtcagatgcgggaagaggtaaaactgctggaacaccatacctgcttcctggcgaatcaggcgctcgtcaactttcggatcgttaaccttcaggccatcgacaatcagatcgccggaggtgatttcttccagtttgttgatgcagcgcagcagggtgcttttaccggaaccggacggcccgataatcaccacgacttcgccctgggcaatgttcaaatcgatattgtgcagcacctgggttgggccaaagtgcttggagacgtttttaaattcaatcacaggattttcatccttctttccagacgacgcagaataaagctcagcaccagggtaataatcagatagaacaccgccacggcgctccagatctcaagggcgcggaagttaccggcaataatttcttgcccctgacgggtcagttccgccacgccgatcacaataaacaggctggtgtctttaatgctgatgatccactggttacccagcggcggcagcatacgacgcagtgccagcggtaaaatgacgtagcgaatggtttcccaacgactaagaccgagcgccagtcctgcttcacgaaaacctttgtggatagacagcaccgcaccacgcgtgatttccgcaatatacgcgccggagttgatcatgatggtgaccaccgccgcagtaaatgggtcgatgcgtaagtcgttaaacgccatcggcagggcgaaataaataaacatcacctggacgacgataggtgtgccgcggatcacttcaataaagaccagcgcgacgtggttggctatccaacctccgaaggtgcgtgcaaaacctgccagcaatccgattaccagaccgcctgccagaccgaggacgctaatccacagggtcattttggcaccttcaatcagaagcggaatggcaggccagatggcactccagtcaaactgcatatgttgttcctgttaccgtggtgtaaataatcaaattcagggtaattaatggccccggagcgggtttgcgcccctcaccctaatcctctccccataggggagagggaactgccagtgcgttttacaggtgtagcgttattatttcggttcagtaccgaaccattttttgtagatttcgttgtaagttccgttctcgcgcagggttttcaacgcgccgttgactttgtcacgcagctcgtcgctacctttcgggaacgcaataccgtattgctgcgcttccagagagtcacctaccgctttgaactgaccgttaccggcggttttgatgaagtacagaatgtttggcgtatcgtgcagaacggcgtctgcgcggttggtgcccagttccatataggcgttatcgatgttcgggaactgacgcagatctttagttttgatgtttgctttcgcgtaatcaacggagccagtaccgctcttcacagcaaccactttcccgtcgagatctttcacgcttttcacatcgttattgttagctttcaccatcactaacaggccgcttttgtagtagccgtcagagaaatcgatcgcttttttacgctcgtcggtgatggtaatgcccgccagcgccagatcgacgtttttggtttgcagtgccggaatgatcccactgaaatccatcggcttcagttcgtaatccagcttcagctctttagcgatggcagcccacagatcaacgtcaaagcccacatatttatcgccctgtttaaattcaaacggaacgaaggcggtatccgtcgcgacaactaattttttatccgcggcatgagaagaaaccgcaaaagccagggtcagtgcagccagactaacttttaatacagacttcatagcatttccttttttctatccacgggacgatcccctgcgtgacattcacatatatgaaaaaatcgtgccagttttgcaactccttgatttttcgagatgcggcaaaaacgtgatgcacgatttatagggcaataccctgaagatgcaccattctggggcaccaatctggtgcgctaaaattgtgcactcaacacagtgattatttagcgtaaaacctgatgaaaaaacaatctttatgtaacgattgtgtgatgatgtggatacaaaaaatttacttaatcagctggagatagcagatggatgcactaaataagtgcgttgaggtgggctgcaaaacaaaacggcctcctgtcaggaagccgcttttatcgggtactaaagttctgcaccatcagcgatggatttattcgatgttagactcgataaaccacaggaatttatccaggtcgcgagacgcggcggtcaggatatctgcggtgtcgtcatctttcgcttcgccaatcgctttgcgtacgtcattagcgacgattgcgtaacggtcagccagttctttcaggtgatcctgaacgttgtggatgtccagcgggtaacttttcagcggggttttgctgttgataacttgagtggtccccagagctacaccgcccagctgcactgcacgttctgccatggtatccagatgatcgatcagtgcggtgcggaagccatccagcatttcatgtacggcaatgaagttagcgccgcgcatgttccagtgcgcttgtttggtaatcaaagaaagatcaataaactggataacctggcgattcagcaactctactgttgcttttttctcgctgtcggagacatcgttgcgggtataaagcagattggtcgctttacttttaactaatttagcggtactcataatttcatatcctcttgatgttatgtcccagtaattaacgagattaagtatagcaccggctatgtgttccgctattctggctgttcctatcacactaatagtggtaacaagcgtgaaaaacaaaactaataaagattcaatgagttagatatattgataagaacaattcttatttatctgctcgccaggaattttcggaataaatatgcttttgcataattcgatatataaagacggtgtagaggaaaagtagcgagaaattctgcatggttatgcataaccatgcagaaatgtaaatttaattaatgtctaattcttttattttgctctctttgcgtactgtcagcgtagaccccatactagcggcgatgatagcgccgagcgccagtagctgtatgggtgtcagtgtttctccgaggaaaatcatcccggaaacggcagccagcgccggttccatgctcatcagcgtaccaaatgtccgtgttggcaaacgggtgagggcaatcatttccaggctataaggcagagcggtgctgagaatagcgacagccagacccaatggaataacgctccagtgccagagtgcttcaccagcctgaagcgctccaattggcacgaaaattaacgctgcaatcaagctaccaattgccaccgtcgcagggccatgttccgctcctgcgcgttgcccacttaaaatgtaaatagcccaacaagccccggcccccagtgccagcgcacagccggttaaatcgacatgggaaacgtcttgccccagcggtagcaggaaccacagaccaagaaccgccagcacaacccagacgaaatctaccgggcgacgagaagagaacagcgccaccgccagtggtccggtgaactccagcgccaccgcaatacccagcggtactgtctgaatagaaagataaaaaagataattcatcccacccaggctaacgccgtaaaacaacagcggtaaccgttgctctttggcaaagcgcagtcgccatggcttaaagaacgcgatgaggatcagcgttcctaatgccagacgcagcgcagtgacacccggtgcgcccaccagaggaaaaagactcttagctaagctggctccaccctgaatagacgccatggcaacgagcaatatgactattggtaaccagaccggcattttacgtaaactaccaggcatcctttctcccacaaatatctagacttaagtaaagcgtggagtgtactggatatacccaatgctggttgagcatttgttgaaaaaattttcccccgttttgactaaaatgcgccaggattgatggaatcattagtctggtgattaggaataatctggatgaatgacagggaaaacatgcgtaatacttacgcagttctctgaaaaagtgatttaaatttagatggatagcggtgtatggaaacgttctgttacatgaaatggcccgttagacatcacaaatcgcgaagagtttcccattaatttttgatatatttaaaacttaggacttatttgaatcacatttgaggtggttatgaaaaaaattgcatgtcttagtgcactggccgcagttctggctttcaccgcaggtacttccgtagctgcgacttctactgtaactggcggttacgcacagagcgacgctcagggccaaatgaacaaaatgggcggtttcaacctgaaataccgctatgaagaagacaacagcccgctgggtgtgatcggttctttcacttacaccgagaaaagccgtactgcaagctctggtgactacaacaaaaaccagtactacggcatcactgctggtccggcttaccgcattaacgactgggcaagcatctacggtgtagtgggtgtgggttatggtaaattccagaccactgaatacccgacctacaaacacgacaccagcgactacggtttctcctacggtgcgggtctgcagttcaacccgatggaaaacgttgctctggacttctcttacgagcagagccgtattcgtagcgttgacgtaggcacctggattgccggtgttggttaccgcttctaatcactttggtgatataaaaaatccgcctctcggggcggatttttgtttttaaggtttcgggtcgaaaatatcggttccgagatggttgtaatccaccttctgtaactggaagttggtgatgtatatcggcccggctttcttctcagatataaacgggtatttgatgttaatttccttcgctttaatccccgtccactgggagaaaaagcctaagaagtcattggcactgcggcgggctttaatcacacgatgcgctttatcgtcgctggaaatgaccataaaaggcacctggaaattttgctgatatttatcatcatgggcaaggtattgcacgtctttaccgcgctctttaaaggccagaccgtggtcagaaaagtaaaccaggctgaagctgctgccgctgttgcgtaactgatcgtacagcttgcgcagtaaatcgtccgtttgcgtcatggtatagagatagcagctcgtttctttgctttgcacaaaggtttcgtattttccttgtgtcctgtcgcaggcctgcggatgactgcccatcagatgtagaacaatcagctgcggttggctgtgctcttgcgccagcacttgagcggtcatatccagtaacgcttcgtctttggtgtttttatctgcttcaaaattaccttctttcaggaagtacacttcatctgctcgtttggcgatgctggcgatagcggtatcgtattcgccgatttgaccctggttggaaaaccaccaggtctggaagcccgcgcgatttgccagggtgacaaagttatcctgaaactgtggtttgccatcgacaacgcgattgagcgttaagccaaggcttttctgcgtggagccactggcggcaatgtagtcagcaaatatcaaaccgttaacgctgctggcaaacggggtattgtcccagtgaccgccaaaggcaccgagggcatcgcgacgcgcgctttcaccgatcaccaccacataggtctgatacttcggcttaacggcagtgaccgtccaggtatctttcattccggaaagttttgccatccgttcttgctcttcaatcacctcgttattattgacgatgacatccttagcaaaacgaaataccggatagccagtatctttcagtttaaatacgccaccccaggccaggttttgcacgggagcaacaaaaaatgtcgccacactgaataccagacacaggctgtcgaaggtattccagcgcgctttttcattctctttttttcgcctgattgctattacgccgagcgcaaaaataaataagccgaccaggtagctgtaccacggaaaaatcgtcaggatttcggtgctctcttccatattggtggagtgcaatgccagcaatgtattgaaattaggcgcgccgtaggcctgagcaaaagggaaataacaagccgccaccaggctactgacaccgaccagaactttttgtacgcgaggcaatgttcgccatagcaaaagcaaaatagccgtaaacgcagcggtgtagagcaaactgaaggggtaacctaagccgaggttaattaataggctctgtaaaaagtagaacgcagtccacgggctaaatacccggctacgggtaacaaggctttctttgagggttaaattcatatgccactatcgtaacaaacgccatgtgcttaccctggcgtcaagggtcaatacctgcaagagtgcgtgaagagtggaaaggggtccgcatccgcgagccgcaatatacgcagggctgcaagaagatagagcgagccgccgtagtggtcaactactgacgaacaaatcttttgcgaaggggattgcaaatccgacaaaaagtggggtttttcagaccaaaacgcgttatgcctgcatgaaagcaggagtgaagcggcgtaccgcgacgccgctatttatcggaaggtttatcttgctgcggtttgttgttgaccatatcgcacaacatagagagcagcattaaccgtactttaaagggagaatgactaaacacgcgcatacacctcttgaactcattcataagacctcctgacttgctaatcccgtcgatccttgaggggtgattgcattacatacagatatagcacaggctatattatatagctattgctaaaacgttaattttttgtaccttcgcaactctggtttacaatgtgcgcacgaaatgagaacgctatgtatgcgtcaccataatgaggaagcacaatgagtcgtcgcgcaggtacgccaacagcaaaaaaagtgacgcagttagtgaacgtggaagagcacgttgaagggttccgccaggtcagagaggcgcatcggcgcgagcttattgatgattacgttgagctgatttctgacttgatcagggaagtgggggaagctcgtcaggtggacatggctgctcgtctgggagttagccaaccgacggtggctaaaatgcttaagcggctggcaaccatggggctgattgaaatgatcccctggcgtggcgtgtttttaacggcagaaggagagaagctggcgcaggaaagccgcgagcgacatcagatagtcgaaaatttcttgttggtgttgggcgtcagtccggaaatcgcccgtcgcgacgcggaaggcatggagcaccatgttagtgaagagacgctcgacgcttttcgtttgtttacccagaaacacggtgccaaatgagcctgccttttttacgcacgctgcaaggcgatcgtttttttcagttattaattcttgttggtatcggattaagctttttcgtgccctttgcaccgaaatcctggcctgctgctatcgactggcacaccatcatcaccttaagcggcctgatgctgctgaccaaaggtgtggagttaagcggttattttgatgtgctggggcgcaaaatggtgcgccgctttgctacggagcgtcggctggcgatgtttatggtgctggcggcggcgctgctttctacctttctgaccaacgatgtcgcgctgtttattgttgttccgctgactatcacgctaaaaagactgtgtgagatcccggttaatcggctgattatttttgaggcgctggcagtcaacgctggtagcctactgacgccaattggcaacccgcaaaatattcttatctggggacgttctggtcttagctttgccggatttattgcccaaatggcaccgctggctggcgcaatgatgctgacgctcctgctcctgtgctggtgttgtttccctggaaaggcgatgcaataccatacgggggtgcaaacaccggagtggaaaccgcggctggtgtggagttgtctggggctgtatatcgtctttctgacggcgctggagttcaaacaagagctgtggggactggtgattgtggcggcaggctttgcgctgctggcacgtcgcgtggtgctcagtgtggactggacgctgctgctggtgtttatggcgatgtttatcgacgtccatttactgacccagcttccagcgttgcaaggcgtgttgggtaacgtgagtcatctatctgaacccgggttatggttaacggcaatcggtttaagccaggtgatcagtaacgtgccgagtaccatattgttgctgaactatgtgccgccgtctttattactggtatgggcggtaaacgtaggtggctttgggttattacccggaagcctggcaaatttgattgcgctacgtatggcgaacgatcgccgcatctggtggcgtttccatctctatagtataccgatgctgttgtgggcggcgttggtgggatatgttttgttagttatactcccggccaactaaggtctggcaaataaaaaaggcggattatgagtccgccttttgctttaagttttgaagattaattcagacgaaccggcatcccggagcggtttttaatcgcttcatcaagaacaacctggtcaacatctggctgaccggtcactgtctgcacgctcttcgtcagggtaattggcacaatttcctgaccttcaaactgggcttcggtggtagacagcgggttatggacttcaatataacggctgccgtctggctcggtggtcgcttttaccggctcatcaataaactgtacgcgggtaccgaccggtactttctcgaacaggaatttgatgtcttcgttacgcagacgcacacaaccatgacttacacgcaggccgataccgaagttggcgttggtgccatggatagcatacaggcgaccgatatagagtgcatacagccccatcgggttatccggacctgccggaacgacagccggaagcggttcgcccgcagcgcggtactctgcgtgcattttggcggtcggcgtccaggtcgggcctgcttttttacgctcaactttggtggtccagttgataggcgtatctttgcctaactgaccaatgccgatcggcagcacgataacggtgttggtccctttcggatagtaataaagacgcatctcagcactgttaatgacgatgccttcatgaacggtatccggcaggatcagctgctgcggaatgttcagtacagtaccgcctttcggcaggaaggtatccacacccgggttcgcttccatcatattggaaagccccatctggtactcggcggcaaaatactccagcggctgagtgttaccttcaggaatggtgatcacctgattctgaccaaccaggcgactcccgtcggttggcagaggataagttaccgcagaggcggtactgcaaaagccgacaacagcgaaggccgctgcgaataatgttttcaatttcatattcatgttaagcgagattttgtgcctggcaggccattgggttgagaatattagagtattggaagcgcattataagttcattccagctcacagtgaaatcagatgtgtacgaaatcacattttttgcctttggcttgagtgtagaccttaagcgaggagcaggatcttctttcagacttatggcataatgcgcggtttgtcatatctcttttcaggatacgcctgtgttagtttccagtaacgtcaccatgcagttcggcagtaagccgttgtttgaaaacatttccgtcaaatttggcggcggcaaccgttacggcctgattggcgcgaacggtagtggtaaatccacctttatgaagatcctcggcggcgaccttgagccgacgctgggtaacgtttccctcgatcccaacgagcgcattggtaaactgcgtcaggatcagtttgcctttgaagagttcactgtgctggatacggtgatcatggggcataaagagttgtgggaagtgaagcaggagcgcgaccgcatctatgctttgccggaaatgagtgaagaagacggctataaagtggccgatctggaagttaaatacggcgaaatggacggttactctgcggaagctcgcgccggtgaactgttgcttggcgtgggaattccagtggaacagcactacggcccgatgagtgaagttgctcctggctggaagctgcgtgtgcttctggcgcaggcgctgtttgctgatccggatattctcctgctcgacgaaccgaccaacaacctcgacatcgacaccattcgctggctggaacaggtgctgaacgagcgtgacagcaccatgatcatcatcagccacgaccgtcacttccttaacatggtctgtacccacatggcggatctggattacggcgagctgcgcgtttatccgggtaactacgatgagtacatgacggcggcgacccaggcgcgtgaacgtctgctggccgataacgccaagaagaaagcgcagattgctgagttgcaatctttcgttagccgctttagcgccaacgccagcaaatctcgccaggcaactagccgcgcgcgccagattgataaaatcaaactggaagaggtgaaagcctccagccgtcagaacccgttcatccgttttgaacaggataagaaactgttccgtaacgcgctggaagtggaaggtctgaccaaagggtttgataacggtccgctgtttaaaaatctcaacctgctgctggaagtgggtgaaaaactggcggtactgggtaccaacggcgtcggtaaaagtacgctgctgaaaacgctggtgggcgatctgcaaccggacagcggcaccgtaaaatggtctgagaacgcgcgcattggttactatgctcaggaccacgaatatgagtttgaaaatgatctgaccgtgttcgaatggatgagccagtggaagcaggaaggcgatgacgagcaggcggtacgcagtattctcggtcgtttgctgttcagccaggacgacatcaaaaagccagctaaagtgctttccggtggggaaaaagggcggatgctgtttggtaagttaatgatgcagaagccgaacattctgatcatggacgaaccgaccaaccacctggatatggaatccattgagagcctgaacatggcactggaactgtatcagggcacgctgatctttgttagtcacgaccgtgagttcgtaagctccctggcgacccgcattctggaaatcaccccggaacgcgtgatcgactttagcggtaattacgaagattacctgcgtagtaaagggatcgagtaagtgattatccgtcaccccgatactgtcggggtgacggcggctgatgacaaatgcaaaatagcctgatgcgctacgcttatcaggcctacgcagtacctgcaatatattgaatctgcaggactttgtaggccggataaggcgttaacgccgcatcaggcattaacaaagcgcatttgtcagcaatctgagtaacgtcgaatcgattttcttaatcccacatcaattcacttccattaattctcaaacatccatgcccaacgctcgcttaccgtgaatgttgaggtcggcaagcgtaaagcgtccttcccagtttgtttcatagtcctcgcgcgggaagtcgcccgggcttgcgcctttttccagtgcggccttcaccttgtgcgcgtaggcaagatttttctcgcacatcggtgccgcaggaatgtacatcacgttgccccaaccttgttgattttcaacgggggcaacggaatggatgacgtcgcagtgccaccagacggagtctccggcttcgagttttggaatgctggttaacgcctcaatcaacagtggatgccattgctcacttaccggcaatactcttccgggcgctacgccgcacagttcatcctccggcacatcatcaagcagcggacgtaacagtacgtacgccatagcttcaggaatgggcacgacgtgcagcagcccctgaccaggcagcatatcagagagcgctgtccagccctggaatgtccgaaacacggaacatttggtggtgttgtccaccgtgtactcttcaacttccgtacgatgtgccgcatgccagggatcatattgcgccagattgccattaaagacgttggcgaaaacgcgctgatacgctggaagcagccagcgttccagtgccccggagtcggtatgcgctccaagacctttggaggtcgttccgggcggacggcggcggatacggtcagggtagatgacgctcacatccgggttaaaccattgctttccatcactttcaaatgtccacagacgattgagaaagctctgcgcattcgccatttcttcactctggcgggcctgcatttgcgcctggctccagtagatggggtaaatctcgggacgactagcgctgagcgtcccgaagaaattatcgccggggcctttgtagacctcgtcaaagcggttgcggtccagatagtccagcatgctctgatcccagcctagcgcttgttcgcgggggaaatggccttttatcaccgcacaaccgcgacgtttaatctgttcgcgctgctctgcagtaacatgacctgctttgatatcggcataagacagcaccggccagacggcatcgccctgtgctttgagtgcgttgatttcagccactcgcgtggcaatgtcatcgcttagctgattaaagatctgctggacgtcgccaagctgcgcccgcagcgcgtgcttcatctgacggatagctgctttgtgatcggcaggcaatgtgtcgctggtaaaagtagaagccataaccacctctcattaactttcattcgaaaccattctgatttgcatgtgacaatataagttataaataagttaatgcaagtttaatgatttgatgtgatgtacaggatgtaaaaagaagggaaaaccggagcgcacggctccggtagagaggtcagctgttaaaaggggatgtgttatccagcaccgcctgaatcacattcagcgcgccttcatgattattatcatcggtagcgtaacgggcgatttgtttaatgttttccgcagcattgcccatcgcaaaggaataacgcgccattttcagcatctccgcatcgttaccgctgtcgccaatcgctaccacattttgcggactcagatcccagcgtttcagtaaccggctaataccgtttgctttatgtagaccgggaataatcaggtcgataaagccaaaaccactggtaacgggtttcataatgccatcgagcgctacgtgcagtttgtcgatcactaacgggatttgttcatccggcaggttgaggctaaacttgaacagtacgtcgtcaatctcctgataatcttttacaggtttcaggcgatggtagtgttttgccatcagtgcgacaaatgcttcgggggcattttcgctgacatatgcactttgcagaccgcaggcgacaaaattgagttgcttatcttttagcaactcgccaataacaatccggctttcatgtcgggtcagttcgccgtggaacaactgcttgccatgttcgtaaaccagtgcgccgttttccgcgacaaaagagatctcatcctttagctcaggaaagaaactaataagctggtaatactgattaccgctggcaacaacgaacttaatgccgcgctttttcagttcctgatattgcgccataaaacgtggttggttgtacgttttggcgtcgttaagaaaagtaccgtccatgtctgtgacgataacttttacgctcataggtgtgctcctggctcgaaaatgaaaccgtaacagtgtaataacaatgtgacgcagagcacaaattatatttcgaatgaaagtaaggatgaaattgatgatgtgaatgatttagcccggcgacgacgccgccgggccgaggagattacagcatatgttcagtacgggcgatgatatcgtcctgagcgtctggagagagcgcggtgaagaacgcggaatagcccgcgacacgcactaccagatcgcgatactgatcgggatgttttttcgcatccagcagcgtttcgcgggaaacgatgttgtactgaatatgccagcctttatgcacttcaaagaaggtacgcagcaggatcatcagtttctgcttgtcagattcgttctccagcgttgccggattcagtttctggttgagcaacacgccgccgagaatcgctgccgtaggcagtttacccacactgccaatgaccgcagtagggccaagatggtcagtaccggaggccgggcttgcgccttctgccagcggggtgtgggctttacgcccgtccggtgttgccatagtctgcgcgccaaacggtacgttagcggagatactactcgtacccgcgtaatagttgccgccaaccggaccacgaccgtagcgcggattatggtactgtttcagttcgtcgatataggtctgataagcgcgagccagcagcgtatcgacagtatcatcgtcgttgccgtacttcggcgcaccgttaatcagccgctgacgcagctgctcgtgagtcaggccgtcgaagtcatctgccagtgcggcagcaagctgttgctgaccaatcgcaccttgttcaaacaccagtttcttcactgccgccaggctgttgccgaggttggcaatgccgacctgcaggccagaaacccagtcatatttcgcgccgccttgcttgatacttttcgctcgctcaatacagtcatccaccagcgcgctgcagagaatatcgtgcacgttctcttccagcatggtgtcgacgacatattcgatttcgatacttttgcgggtgtagtaacggatttgcgtatcccacgcgtccatcacttcatcgaagttgttgaagttacctgcgctcaacgctttttcttgtggcaggaacactttgccgctggtggcatcatgcccgccttccagcgccgccagcatcacgcgggcgaagttgataaagctcatgccggtacagcgatagccccatttgccaccgacggcggtttctatacaaccaatcgctgcgtagtcataagcgtcctgcggttcaataccgagtttaataaattccgggatcacgatttcgtcgttgttgaacgccggcatcccgaagccgcaacggatcacctgtacgcaggcgtcgaggaaatcgttgctcattcctgcatggtaacgcacgctgaggttaggctgagtggaacgcaggcgaccgcaggattcgaggatcgcgtaagagagtggattcaccgcgtccattggttgaccatcaaccagattttgcccgccaatagtgacgttctgatacagcggacttcccgcagaggctttactgtgactgccggagcggatcttgttcacttccagcagtttcagccagcagctatgcagcatctcgatggcgtgttcgcgatccagcgtctggttgagttcaacgtcgcggcgatagtacgggtagagatactggtccatacgaccaaagcttacactgtgaccgttagattcgatctgcaaaatcaactggatgaagtaacacagttgcagcgcctgccagaaagtctgcggcggctggtgggcgataagatcgcagttttctgccatcgccagcagttcatcgcgacggctttcgcgggtttcggtcgcggccatttcacgcgccagggcagcgaaacgttcaatgtgttcactgactgccaccagcacgatatcaatcgctttcaggaattgctcaccgtgtaaatcttccagcaccgtcaggttgatgcggctgcgacgttccgctacttcctcgcgcagaccatcaagccctttttccagcagcagcgggaaattcaccgccaggtgcgcatcgccggaggtcatattgccttccgctttaatgattccggtcgccagcagacctttttgctcatcggtaaacatgccgtagcagcgatcctgtacggtctgaccgcgccaccacgggcacacttcatgcagaacgcgtttgttctcttcgctcaccgcaaagccagcaccgggacgatctgccagatcatcaatctctttttcgatccagctgacagtatattccgggaagatcggcgcggcgcgaacttcgcttgcctggttgccaatgatcaactcatcgtgtttgatccagatggtgcgattcgccaggtgatgcgccagtgccagcgcgcgacgtaccgggatcggcttatcgagatgttgttgatacatctcggtatagtgctgcgcgcgctcggtacagactggcggtttcacaatatgcaccagcgcatttttgtgcgctttaatgcggtcgctgagcgtgtccagtttcagtgtggtcatggttgttatcctcgtaaggtcgcggttaaccctttctggcaggcatactgctgggcaaagtcgagcagttctggcgcatcaagcggtttttccggggcgtcatagggcagattaagtaagtgatatttgttgatgcccagcgtgtggtagggcagaaaatgaatttcgccaacgtgcagctcgtcggcggcaaaatcggtaatggcttttacagaggtttcgtcggcattaaagccctgaatcagcggcacgcggataatgatttttttgcccgctgcggcgagttttttcaggttatccagcactctggcggcgttaccgtcggtccactgtttaaacggcgcgtcggcaacgtgttttaaatcggcaagaaacagatcgatatagggcagagaaggggcgatatatttccacggcacatgcagacaggtttctaccgcagtatgaatgcctgcctcgtggctggcttgcagtagcgccatcgccatttccggctgcataaagggctcaccaccgctaagcgttaaaccgccgccgctgcgatcgtaaaacggtttatcgcgcagaacggtcgtcatgatctcctcaacgcttttcacttcaccacacacggttaatgcctgtgtcggacagcagtcggttaacgccgtcagatgctccggggttaacttttcccgatgaataagcaaaccattcagcgcgcgctcaatcacttccggcgcggccttagcgcacagctcgcagccttccagacacagtcgtgcgtcatacagcagatcctgcgtgcgggcgcggctttccgggttctgacaccagcggcagcccaggctacagcctttaagaaatacgaccgtgcggataccggggccatcatgggtgctgtagcgctgaatattgaaaatcatagttgcctctctatttcgttcaagcattaaaatactttcgaatgaaagttagattgatgtgcgtcaactgttcagagagttttcccgtgatagtctacattcagacaaaaagtacattttgaggatggttatggaactgtatctggatactagtgacgttgttgcggtgaaggcgctgagtcgtatttttccgctggcgggtgtgaccactaacccaagcattatcgccgcgggtaaaaaaccgctggatgttgtgcttccgcaacttcatgaagcgatgggcggtcaggggcgtctgtttgcccaggtaatggctaccactgccgaagggatggttaatgacgcgcttaagctgcgttctattattgcggatatcgtggtgaaagttccggtgaccgccgaggggctggcagctattaagatgttaaaagcggaagggattccgacgctgggaaccgcggtatatggcgcagcacaagggctgctgagcgcgctggcaggtgcggaatatgttgcgccttacgttaatcgtattgatgctcagggcggtagcggcattcagactgtgaccgacttacaccagttattgaaaatgcatgcgccgcaggcgaaagtgctggcagcgagtttcaaaaccccgcgtcaggcgctggactgcttactggcaggatgtgaaagtattactctgccactggatgtggcacaacagatgattagctatccggcggttgatgccgctgtggcgaagtttgagcaggactggcagggagcgtttggcagaacgagcatttaaccggacgttctgcatcctcataaattgctgatgacgtggcggagtgccgcgtcttatcaggcctggaggtggcaattactgcccacacacctcacaccccggattacgcatcagtttcatttcgcgaaactgacaggtcatcgcatcgtacatgacgattttcccgctggccggtttgccataacctgccagcattttgatcgcttccattgcctgcaagctaccaattacgccgatcaacggtgccattgcgcctgcttccacgcaggttaatgcattttcaccaaacaaacggctaaggcagcgatagcacggttcaccgtcctgataagtaaagacggtgatttgaccttccatacgaattgccgcgccggaaaccagcggtaccttcgcggcaaaacagcctgcgttcagttgattacgtaccgcaacgttatccgtacagtcgagcaccagatcgtgttcagcaatcaatgctgcaagttctgcgtcatccagcagtgcattgactggcgtaatcgcgatatgtgggttgatccgcgtcagggcgtcacgggcggattccaccttcggttgcccgaccgtggcatcactgtgcagtgtctggcgttgcagattgctgaggctaaccgtgtcgaagtcgagcagcgtcaggttaccgacaccggcgcttgccagatactggctggctgcacagccgaggccgcccaggcccactatcagcacgcgagaatctttcagcgcctcctggccgtcaaaatcaaagccgcgcagaatgatttgccggttgtagcgcagcatctcctgatcgctgagttccgccattacaggcctccgaacaacgcgttaaacggttctacttccacccattcgcccacttccacattgccgcgatcgcgttccagcacgataaagcagttgccgaggctaaaggagctaaatatatgactaccctgatgtccggtggtcgtcacttccagttcgccatcggcgttgcgttgcagcacgccgcgctggaaatcaagacgtcctggcgtttttttcaggcgggacgctgtgcgtacgcgctggcgcgcgggcaggccgctggcggtgttaccgcttagttttgccagcaaaggctgtaccagttgatagaaggtcagcgtcgcactaaccgggttgcccggcaggccgcagaaccagctattgctgagtttaccgaacgcgaacggtttacctggtttaatcgccagcttccagaaggcgatctcccccagctcttcaagaatcgttttggtgtaatccgcctcacccacactaacaccgccggaactgatcaccacatccgcctggctgtcggcttcaataaatgcggcgcgcagggcatggggatcgtcgcggataatccctaagttaattacctcgcatcccaactgttctaacatcaggtgtacggcgagacggttggtatcgtagatttggccgtcgcccagcggctgaccgggcaactggagttcatcaccggtagaaaaaagcgctacacgcactttacgaatcaccggaacttcggcaatccccagactagcaattactggcagctctgcggtagtcaggcgagttcccgccgggaaaacaaccgcacctgcagagatatcttcaccgcgacggcgaatattttgcccgctacgcacttcagcagtaaaacgcacgccattgtccatttgttcagtctgctcctgcatcaccaccgcttcgcagccttccggcaccggcgcaccggtcataatacgaatgcaggtacccgcaggccattcaccatggtatggctgaccggcaaaggatttaccggcaacgggcagcggttgcccggaggcaatatcggctaaacgcaccgcgtagccgtccattgcggagttatcaaaccccggaacatcaagcgggctaacgacatcgctcgccagaatacgaccaaaacactgtaccagtggcagcgtttcctgggcggtcagtggggtgacgcgagaaagcatctcattaagcgcggtgtcgaggctcatcaatccggtggtaaattccatgaaaacactcctgcggaggcaaaatcgaatttgcctattatgtcagaaaaacgccacagactgtatgccacctcgggcgtagcgctgggtcctgcctttacatgccatatccatctttctatattcaaaaattgaatgagtaattcataaaaattctgatatttatagcaaaagtggcgaaccacccttaatggacgaatactatgggcaaagcagtcattgcaattcatggtggcgcaggtgcaattagccgcgcgcagatgagtctgcaacaggaattacgctacatcgaggcgttgtctgccattgttgaaaccgggcagaaaatgctggaagcgggcgaaagtgcgctggatgtggtgacggaagcggtgcgtctgctggaagagtgtccactgtttaacgccggaattggcgctgtctttacgcgtgatgaaacccatgaactggacgcctgtgtgatggatggtaacaccctgaaagccggtgcggtggcgggcgttagtcatctgcgtaatccggttcttgccgcccggctggtgatggagcaaagcccgcatgtgatgatgattggcgaaggggcagaaaattttgcgtttgctcgtggcatggagcgcgtcagcccggagattttctccacgtctttgcgttatgaacaactactggcagcgcgcaaggaaggggcaaccgtcctcgaccatagcggtgcgccactggatgaaaaacagaaaatgggcaccgtgggggccgtggcgttggatttagacggcaatttggcggcagccacgtccacaggcggaatgaccaataaattacccggacgagttggcgatagtcccttagtgggtgccggatgctacgccaataacgccagtgtggcggtttcttgtaccggcacgggcgaagtcttcatccgcgcgctggcggcatatgacatcgccgcgttaatggattacggcggattaagtctcgcggaagcctgcgagcgggtagtaatggaaaaactccctgcgcttggcggtagcggtggcttaatcgctatcgaccatgaagggaatgtcgcgctaccgtttaacaccgaaggaatgtatcgcgcctggggctacgcaggcgatacgccaaccaccggtatctaccgtgaaaaaggggacaccgttgccacacagtgatgaacttgatgccggtaatgtgctggcggttgaaaatctgaatattgcctttatgcaggaccagcagaaaatagctgcggtccgcaatctctcttttagtctgcaacgcggtgagacgctggcaattgttggcgaatccggctccggtaagagtgtgactgcgttggcattgatgcgcctgttggaacaggcgggcggtttagtacagtgcgataaaatgctgttgcagcggcgcagtcgcgaagtgattgaacttagcgagcagaacgctgcacaaatgcgccatgttcgcggtgcggatatggcgatgatatttcaggagccgatgacaagcctgaacccggtatttactgtgggtgaacagattgccgaaagtattcgtctgcatcagaacgccagtcgtgaagaagcgatggtcgaggcgaagcggatgctggatcaggtacgcattcctgaggcacaaaccattcttagtcgttatccgcatcaactctctggcgggatgcgccagcgagtgatgattgcgatggcgctgagttgccgcccggcggtgctgattgccgatgagccaaccaccgcgctggatgtcactattcaggcgcagatcctgcaattaatcaaagtattgcaaaaagagatgagcatgggcgttatctttatcactcacgatatgggcgtggtggcagagattgccgatcgggtactggtgatgtatcagggcgaggcggtggaaacgggtaccgtcgaacagatttttcatgcaccgcaacatccttacacccgtgcgctgttagctgctgttccgcaacttggtgcgatgaaagggttagattatccccgacgtttcccgttgataagccttgaacatccagcgaaacaggtcccccccatcgagcagaaaacggtggtggatggcgaacctgttttacgagtgcgtaatcttgtcacccgtttccctttgcgcagcggtttgttgaatcgcgtaacgcgggaagtgcatgccgttgagaaagtcagttttgatctctggcctggcgaaacgctaagcctggtgggcgagtctggcagcggtaaatccactaccgggcgggcgttgctgcgcctggtcgaaagccagggcggcgaaattatctttaacggtcagcgaatcgataccttgagtcccggcaaacttcaggcattacgccgggatattcagtttatttttcaggacccttacgctagcctggacccacgtcagaccatcggtgatagcattatcgaaccgctgcgtgtacacggtttattgccaggtaaagacgcggctgcacgcgttgcgtggttgctggagcgcgtgggcctgttacctgaacatgcctggcgttacccgcatgagttttccggcggtcagcgccagcgcatctgcattgctcgcgcgttggcattgaatccaaaagtgatcattgccgacgaagccgttagcgcgctggatgtttctattcgcgggcagattatcaacttgttgctcgatctccagcgtgatttcggcattgcgtatctgtttatctcccacgatatggcggtggtagagcggattagtcatcgtgtggcggtgatgtatctcgggcaaattgttgaaattggtccacggcgcgcggtcttcgaaaacccgcagcatccttatacgcgtaaattactggcggcagttccggtcgctgaaccgtcccgacaacgaccgcagcgtgtactgctgagcgacgatcttcccagcaatattcatctgcgtggcgaagaggtggcagccgtcagcttgcaatgcgtcgggccggggcattacgtcgcacaaccacaaagtgaatacgcattcatgcgtagataacattcaggcggagaataaaatggcaagagctgtacaccgtagtgggttagtggcgctgggcattgcgacagcgttgatggcatcttgtgcattcgctgccaaagatgtggtggtggcggtaggaagcaatttcaccacgctcgatccgtatgacgcaaatgacacgttatctcaggccgtagcgaaaagcttttaccaggggctgttcggtctggataaagagatgaaactgaaaaacgtgctggcggagagttataccgtttccgatgacggcattacttacaccgtgaaattgcgggaaggcattaaattccaggatggcaccgatttcaacgccgcggcggtgaaagcgaatctggaccgggccagcgatccggcgaatcatcttaaacgctataacctgtataagaatattgctaaaacggaagcgatcgatccgacaacggtaaagattaccctcaaacagccgttcagtgcgtttattaatattcttgcccatccggcgaccgcgatgattagtccggcagcgctggaaaaatatggcaaggagattggtttttatccggtgggaaccggaccgtatgaactggatacctggaatcagaccgattttgtgaaggtgaaaaaattcgcgggttactggcagccaggattgcccaaactggacagcataacctggcgtccggtggcggataacaacacccgcgcggcaatgctgcaaaccggtgaagcgcagtttgctttccccattccttacgagcaggccacactgctggagaaaaacaaaaatatcgagttgatggccagtccgagtattatgcagcgttatatcagtatgaacgtgacgcaaaagccgttcgataacccgaaggtccgtgaggcgctgaattacgccattaaccgtccggcgctggtgaaagttgcctttgcgggctatgcaacgccagctactggtgtggtaccgccaagtatcgcctacgcgcaaagttataaaccgtggccttacgatccagtgaaagcgcgcgaattactgaaagaggcgggatatcccaacggtttcagtaccacgctgtggagcagtcataaccacagcaccgcgcagaaagtgctgcaatttacccagcagcagttagcgcaggtcgggattaaagcccaggtgactgcgatggatgccggacagcgggcggcagaagttgaaggtaaagggcaaaaagagagcggcgtgcggatgttctacactggctggagcgctagtaccggcgaagcggactgggcactaagcccgctgtttgccagccagaactggccaccgacgctgtttaataccgcgttttacagcaataaacaggtggatgacttcctggctcaggcactgaaaactaatgatccggcggaaaagacccgcttatataaggcggcgcaggatatcatctggcaagaaagcccgtggatcccgctggtggtagaaaaactggtgagcgcacacagtaaaaacctgaccggtttttggatcatgccagacaccggcttcagctttgaagacgcggatttgcaataagcaacgcagggagtggaatgcttaattacgttatcaaacgcttactggggttgattccgacgctgtttatcgtcagcgtgctggtgtttttatttgtccatatgctgcccggcgatccggcgcgattgattgccgggcccgaagctgatgcgcaggttatagaactggtgcgtcagcagctggggttggatcagccgctgtatcaccagttctggcactatatcagcaatgctgtgcagggggattttggcctgagcatggtgagccgtcgtccggttgccgatgagattgccagccgctttatgccaacgctgtggctgaccataaccagtatggtctgggcggttatatttggtatggcggcgggaattatcgccgccgtctggcgtaaccgttggccggatcgattgagtatgaccattgcggtgagcgggatcagctttccggcatttgctctggggatgcttttaattcaggtattctccgttgaactgggctggctgcctaccgtgggagcagacagttggcagcactacattttaccctccctgacgctcggcgcggcagtggccgccgtgatggcgcgctttacccgcgcgagctttgtcgatgttttaagcgaagattatatgcgtaccgcgagggcgaaaggggtgagcgaaacctgggttgtcctcaaacacgggctacgtaacgcgatgatcccggtagtgaccatgatgggcttacagtttggctttttgctcggtggttccatcgttgtggagaaagttttcaactggccgggacttggacgcttactcgttgactccgtagaaatgcgtgattacccggtgattcaggcggaaattctgcttttcagcctggaatttattcttatcaacttagtggtggatgtgctttacgccgccattaacccggctatcaggtacaagtaaggatgcgactatttaactggcgacgtcaggcggtgttaaacgccatgccactggtcaaacctgaccaggtacgtacaccgtggcatgaattctggcgacgatttcgccgtcagcatatggcgatgaccgccgcattattcgttattttattgattgtggtggccatttttgcacgctggatcgctccctatgacgccgaaaattattttgattatgacaatctgaataacggaccttctttgcagcactggtttggcgtcgatagtctggggcgtgacattttcagccgtgtcctggttggtgcgcaaatcagcctggcggcgggcgtgtttgccgtgtttatcggtgcggcgatcgggacgttgctgggcttgctcgctggatattatgaaggctggtgggatcggctgatcatgcgcatttgcgatgtgctgtttgccttcccgggtattttactggcgatcgctgttgttgcggtgttgggaagcggcattgctaacgtgattattgcagtcgccattttttccatccccgcgtttgcccgcctggtgcgcggcaacacgctggtgttgaaacagcaaacctttattgagagtgcacgcagtattggtgccagcgatatgaccgttttgttgcgtcatatcctgcctgggaccgtctcttctatcgtggtgtttttcaccatgcgcattggtaccagcattatctctgccgccagcctcagttttctcggcctcggtgcgcagccgccgacaccagagtggggagcaatgctcaatgaggctcgagcggatatggttatcgcgccgcatgtcgctgtttttccggccctggctatttttctgaccgtactggcgttcaatttgttgggcgatggtttacgcgatgcgctggatccgaaaattaaaggataattacgtttgaatattgcttgaaagggtaatcacctcacaggaaattattgccctaagcaagtgttgtaactttctgctgattttgtagaatcgggtaatttggttaaaaagccgcagcaagggacaatttttgcagcggcacagcgttcagatagttattttgttaaatgtattaacatgctgagtttatacgaaaagataaagataaggctgataattttatttttattggcagcactgagttttattggtctttttttcatcattaactatcaactggtaagcgagcgcgcggtaaaacgtgccgatagccgctttgaacttattcagaaaaacgttggctatttctttaaagatattgaacgtagcgccctgacattaaaggacagtctgtatttattaaaaaatacagaggagattcaacgcgccgtgattcttaaaatggaaatgatgccatttttagacagcgtgggactggtacttgatgataataaatattatctttttagccggagggcgaatgataaaatcgttgtttatcatcaggaacaagtaaatggaccgcttgtcgacgagagtgggcgggttatttttgccgattttaacccaagcaaacgaccgtggagcgtggctagtgatgactctaacaacagctggaatccggcatacaattgctttgatcgtccgggtaaaaaatgtatctcttttacgctacacatcaacggcaaagatcacgatttgttagcggtggataaaattcatgtcgatttaaactggcgatatctgaacgagtatcttgatcaaatcagcgctaatgatgaagttctatttttgaaacaaggccatgagatcattgccaagaatcaactcgctcgtgaaaaactgattatttataatagcgaaggtaattataatattattgattctgtcgatactgaatatatcgaaaaaacaagtgcggtgccaaacaacgcattattcgaaatctatttttattatcctggcggtaatttattgaacgcaagtgataaacttttttatctgccgtttgcgttcattattatcgtattgctggtggtttatttaatgaccactcgtgtgttccgtcggcaattttctgaaatgacagagctggttaatacgctggcgtttttgcctgacagtacggatcaaatcgaggctctgaaaattcgtgaaggcgatgcgaaagagattatcagcatcaaaaatagcatcgcggaaatgaaagatgccgaaattgaacggagtaataaattgctcagtctgatctcttacgatcaggaaagtggttttattaaaaatatggcgattattgagtctaacaataatcagtatctggctgtggggatcatcaaactgtgtggtctggaagccgtggaagcggtgtttggtgttgatgagcgcaataaaatcgtcaggaaattgtgtcagcgaattgccgagaaatatgcgcaatgctgcgatatcgtgacattcaatgccgatctctatttacttctgtgtcgggaaaatgtacagacatttacccgtaaaatagcgatggtaaacgattttgacagcagctttggctaccgcaatctgcgcatccataagtctgccatttgtgaacctttgcagggggaaaacgcctggagttacgcagaaaaactgaaactggcgatttccagtatccgtgaccatatgttcagtgagtttattttctgtgatgacgcgaaactcaacgaaatagaagagaatatctggattgcgcgtaatattcgccatgcaatggaaattggcgaactattcctcgtctatcaaccgatcgttgatattaacacccgcgccattctgggcgcggaggcgttgtgccgttgggtgtctgcggagcgggggatcattagtccgctgaagttcattaccattgctgaagatatcgggtttatcaatgagctgggttatcagattattaaaacggcaatgggtgaattcagacattttagtcagcgtgcgagcctgaaggatgatttcttactgcatattaatgttagcccctggcagttaaacgaaccacactttcatgagcgttttaccaccatcatgaaagaaaatggcctgaaggcgaacagcctctgtgttgagatcactgaaaccgtgatcgagcgaattaatgaacatttttatctcaatattgaacaactgcgtaaacaaggggtacggataagcattgatgactttggcaccggtttgagtaacctgaaacgtttttatgaaattaatccagacagcataaaggtggacagccaattcaccggcgatattttcggtactgcgggaaaaattgtgcgcattattttcgacctggcacgctataaccggatcccggtgattgcggaaggcgtagagagcgaagacgttgcgcgcgaattaatcaaattaggatgtgttcaggctcaggggtatctgtaccagaaacccatgccattctccgcctgggataaaagtggaaaattagtaaaagagtaatttacgtatgtccagaatcaataagttcgtacttacagtcagtctgctgatttttatcatgattagtgcagttgcctgcgggatctacactcaaatggtaaaggaacgggtgtatagcctgaaacagtccgttattgatactgcttttgcggtggcaaatattgctgaatatcggcgtagcgtggcaattgatcttatcaacacgctaaatcccacggaggaacagctgttggttggtttgcgcacagcttacgccgacagcgtttccccctcttatttgtacgatgtcggtccttatctgatttccagtgacgaatgtattcaggtaaaggagttcgagaaaaattattgtgcagatattatgcaggttgtgaagtatcgacatgtcaaaaatacagggtttatctcttttgacggtaaaaccttcgtctattacctctatccggtaactcacaatcgtagtctgatatttttgcttggtctggagcgtttttctttactgagtaaaagcctggcgatggacagcgagaacctgatgttctctctatttaagaacggtaaaccggtgaccggtgatgaatataatgctaaaaacgccatcttcaccgttagcgaagcgatggagcacttcgcctatttgccgaccggattgtatgtatttgcgtataaaaaagatgtttatttgcgggtttgtacattgattattttctttgccgcattggtggcagtgataagcggtgccagttgcctctatctggtacgcagagtgattaatcgtggtattgtggagaaagaagccatcattaataaccattttgaacgcgtactggatggcgggcttttctttagcgctgccgatgtcaaaaaactctacagtatgtataacagcgcgttcctggacgacctgaccaaagcaatgggcagaaaatcctttgacgaagatttaaaagcgctgccggaaaaaggcggttatttgtgcctgtttgacgtcgataaattcaaaaacattaacgacaccttcggtcatttgctgggcgatgaagtgttgatgaaagtggtgaaaatccttaaaagtcagatcccggtagataaaggtaaagtctaccgcttcggcggtgacgaatttgcggtgatttatacgggtggaacgctggaagagttgctaagcattctaaaagaaatcgttcatttccaggtgggaagcattaatttaagtaccagtatcggtgtagcacatagtaatgaatgtcctaccgtcgaacgcttgaaaatgctggcggatgagcggctgtataagagtaagaaaaacggcagggcacagattagctggcagtaatcattattcgcaggccggacaaatgattttgcccggcctgaattaattaaacccggctaccccacaaatcgtactcatcggcgtgctcgactttcacacgcaggatatcacccggcttaacgttggtttcaccattgagataaaccgcgccgtcgatttccggtgcatctgccatgctgcgaccaatcgcgccttcttcgtccacttcgtcgataatcaccagaatttcacggcccactttctcttgcaggcgctcggcggaaatctgctgctgcagctgcatgaaacggttccagcgttcttctttaacttcttccggaacctggtcaggcagggcattggcgtctgcaccttcaaccgggctgtatttaaagcagccaacgcgatccagacgcgcttctttcaggaagtcgagtagcatctggaaatcttcttctgtctcgccagggaagccgacaataaaggtactgcgtagggtcagttccgggcagatttcgcgccactgtttgatgcgcgccagttggcgatctacagaacccggacgcttcatcagtttgagaatgcgcgggctggcgtgctgcaacggaatgtccagatacggcaggattttgccttctgccatcagtgggatgacgtcgtccacatgcggataagggtaaacgtagtgcagacgtgtccagatccccagtttgcttaactgttcgcacaggctgaccatgctggtttttaccggctcgccgttgtggaagccagtacgatgtttaacatcaacgccataggcggaagtatcctggctgatcaccagaatctctttaacgcccgcatctaccagacgtttcgcttcacttaacacttcgccaatcggacggctcaccaggtcgccgcgcatagacggaataatgcagaaggtgcagcggtgattacagccttcagaaattttcagataggcataatgacgcggcgtcagtttcacaccttgttctggcaccaggctcaggaatgggttgtgtttcggttttggcacgtagtgatgaacgtgctccagaacctgctcatagctatgaggcccggtgatttccagcactttcgggtggacttcgcggatctgatcttcttttgcccccagacaaccggtcacaataaccttgccgttttcattcaacgcttcaccaatggcttccagactttcttgtaccgcgctgtcaataaagccgcaggtgttgacgatcaccatgtccgcatcgtcatagctcggtaccacgtcataaccttcagtgcggagttcggtgagaatacgctcactatcaacaaggtttttcggacagccaagggaaacaaagccgattttcggctggggagttactttgctcatagcttaaaaaatattcagttacaggaaaggtcagggcagggattctacagagttctggataaaatttgtatcgcaatctcattcgctggcggaggcgaaggaaatgtaaattttgttaattcggcgtgaagaattgatcctggacagcattttgctcaaaaaatagccatactatttaattgcaacaaggctgggaagaggaggatcgaagtatgttcgttgacagacagcgaatcgatctgctgaaccggttgatcgacgcacgcgttgacctcgccgcatacgtgcaactgaggaaggcaaaaggatacatgtccgtcagcgaaagcaatcatctacgagataacttttttaaactgaatcgcgaactgcacgataaaagcctgcggttgaatcttcatctggatcaggaagagtggagtgctcttcatcatgctgaagaagcattagcgacagccgcagtatgtttgatgagtgggcaccatgattgcccgactgttattaccgtcaacgccgataagcttgaaaattgtctgatgagcttaacgctgagtatccagagcctgcagaagcacgccatgcttgagaaggcctgaaaactaagggggagaaagcgtctcccccttcatgtttaagtttttgtaaaaatgaatttgttatctcctccactgactacgctttaagccagagtcaatccggaggcgttatgcatcgacaatcctttttccttgtgccccttatttgtctttcttccgctctctgggcggctcctgcaacggtaaatgtcgaagtactgcaagacaaactcgaccatccctgggcactggcctttttacccgataatcacggtatgttaatcactctgcgcggcggcgagttgcgtcactggcaagcaggaaaaggattatctgcgccgctttccggagttccggacgtttgggcgcacgggcagggcggcctgctggacgtggttttagcgcctgattttgctcagtctcgccgcatctggttaagttattccgaagttggcgatgatggcaaagccggaactgctgtgggttatggccgcttaagtgatgatctcagtaaagtgaccgacttccgcaccgtctttcgccagatgccaaaactgtctaccggcaaccattttggcgggcggctggtattcgacggtaaaggttatctttttattgctctgggcgaaaacaatcagcgcccgacggcgcaggatctggataaattacagggcaaactggtgcgtctgaccgaccagggcgaaatcccggatgataatccttttataaaggaatccggtgcgcgcgccgagatctggtcttatggcattcgtaatccgcaaggaatggcgatgaatccgtggagtaatgcactgtggctgaatgaacatggcccgcgcggtggtgatgaaattaatatcccgcaaaaaggcaaaaactacggctggccgctggcaacctggggaatcaactatagtggctttaagataccggaagcgaaaggggagatcgtcgccgggaccgagcaacctgttttttactggaaagatagccccgctgtgagcggcatggccttctataacagcgataaattcccccagtggcagcaaaaattatttattggcgcgctgaaagataaagatgtcattgtgatgagcgtcaacggcgacaaagtgacagaagatggccgtattttaacggacagagggcagcgaattcgtgatgttcgcactggacccgacggttatttatacgttctcaccgacgagtccagtggggaattacttaaagttagcccacgcaattaactaacgggaatcatcaccactttgcgcactgcggggcgttcagtgagttgctgataccagcgttgcagatttggacgcggtgtccaggtcaggccaacgttaaacaaattgtagatgaacggtgcgatagcgatatcgcccacaccaaactcgtcgccagagaaccattttacttttgccagttccgcatcgagcagggcaaacagggcgtcgcactctttgcaactggcatcaatggcggcctgatcgcgctcttccggtggtgttctgactaatcccatcaggatcccgcgatgagcattactgagcgtctggtttgcccagtccatccatttttccgcttccgcacgacgtgccggactgtcgatccacaggcgtttttgcccgtactgtgccgccagatagcggacaatggcgttactttcccaaagaatgagatcactttcgtcgtcacgcaacaacggcaccagcccgttagggttcatcgccagaaaatcagcatcgtgatttatcccaaactcacggcccgcgagaatttgctcataaggtagttccagttcttcgagcgtcagcaatactttttttacgttagtactattattccgaccccacagcgtaatcatactcaccccttttccgacaggcagccacaggctgaacaggactccgatggtgaagtaaagttaacttttaagcaacagctggcaaaaaaatgacaccagaagcagcgaagcggcaggatattgcataaactttaaaaactttaccaacttacggtttctttaagtttgtgtgtgcgttattaatcaccaaacttatcatacggcgatataacgtattttttttgaatggatactcgggtggcatttatgacgcaatactcctctctccttcgtggtcttgcagcgggttctgcatttttattcctttttgccccaacggcattcgcggcggaacaaaccgttgaagcgccgagcgtggatgcgcgtgcatggattttaatggattacgccagcggtaaagtgctggcagaaggcaatgcggatgagaaactggatcccgcgagcctgactaaaatcatgaccagctatgtggttgggcaggcgcttaaggccgataagattaaactcaccgatatggtgacggtcggtaaagatgcctgggcgacgggaaatccggcactgcgtggtagtagcgtaatgttcctcaaaccgggcgatcaggttagcgtggcagacttgaacaaaggtgtgattatccagtccggtaatgacgcctgtattgcgctggctgattacgttgccgggagccaggagagttttattggtctgatgaatggttatgccaaaaaactgggtctgaccaacactaccttccagacggtgcacggcctggatgcgccggggcagttcagcaccgcgcgcgatatggcattgctgggtaaagcattgatccacgatgtgccggaagagtacgccattcataaagagaaagagttcaccttcaacaaaattcgtcagcctaaccgtaaccgtctgctgtggagcagcaatctgaatgttgatggcatgaagacaggaaccacggcaggcgcgggatataatctggttgctagcgctacccagggcgatatgcgtttaatctccgtagtgttgggggcgaaaaccgaccgtatccgttttaatgagtctgagaaattattgacctggggtttccgcttctttgaaaccgtgacgccaattaaacctgatgccacctttgtgactcagcgcgtctggtttggtgataagagcgaagtgaatctcggggcaggtgaagcgggcagtgtgaccataccgcgtgggcagctgaaaaacctgaaagcgagttatacgttaacggaaccgcagcttaccgcaccgctgaaaaaaggtcaggttgtcgggaccattgatttccagcttaacggtaaatccattgagcagcgtccgctgatcgtgatggaaaatgtggaagagggcggattctttggtcgggtgtgggatttcgtgatgatgaaattccatcagtggttcggcagctggttctcttaatcttctgataaccggatggcgcgaaacgtcatccggttatacgtcattaatacatcaacttaatgcgctgcgtctgcgcgtacttcacatactcatcttccgggcaacaatcgctcaccacaatatcaaagcgtttcaggtcacccatgcgcgccggacgcaccttgccaaatttactgtggtcgacaaccagcacatgcttttgcgccatgctcatggcccagtgttttaccggcaactcttcaagattaaaacaggtagcgcctttactgacatgcacgcccgccgcagaataaaaagcgatatccgggcaaaaattattcagcgtttgctgaaaatcgatgggtttgaaaatggcgttgctggcgtgaaattcaccaccgcaaagaaacgcgcggcaatggggtttctctttcagcgccagaaaggtatttaggctataacaaacggcggtaaaagggatttcattatcaatcgcttcaataatccacggcgtggtggtgccacagtcaaaaaagagggtctgatcgggttctaccagcgtcgcagccagttttgccgcccggcgtttttcttccaccaggcgggatttttgatcgcttaacaggtaatggctggcactgcgcggttccagaacaatatagccgccgagcaaaacgacgggcgcactgtggttgttcagatcgcgacgaatcgtcatctcgctaaccccaagcagggcggcggcgtctttaagatgtaacttatcgctgcgttttaattcttgcagcagctgcccgatacgctcttcgcgacgtgtttccataatccctctgaatagttattgaagcgagccgctcaatactacactttttagcagagatcagtcacgcacccagcctttgcggatcggtaatgcaaaacagacgcgataccagctttgcagacgttgatagagtttatgccccatcgcttgccagataatctgggcactaaggcagccaatcatacctgccagcaatccaccgagcatatccagcggccagtggacgccaagataaacgcggctccaggcaatgacgacggccagcaccattaaaagactgccggaccacaggcgatgccagcataaaaatgccagtgcaaaggtgaaaatcaccgtaccgtgatcgcttgggaaactgtcatccgccgcatgatgcaggaagttatagccgatattttcgacaaagggtcggtcgtgcggaaaaagatgtcccatcgtccaggacacaaacaggctgaccgccagcgcgatagcgatttttatcaccagttgccgttgtgctgtaagcccccacaaccaaagtaccacggccagcaacggcaccacggtaatcaaatctttagcaataaaaatcgccaagctgatcatccacggagcgctgtctggcgtcgcgttaataagagagaatagagagagattcaaattttccagcataacttcccgacgcaaagtgattaaaagggagccaatacaggcaagtcgttgagaataaagtgcaggttaaactgggtaaagcggcatcgtcttatttccctcaagcggcctgtttacggtgggtgattgtaacgggcataggttaaataaaacttaaagaaagcgtagctatactcgtaataatgtaagaatgtgcttaaccgtggtttcagctacaaaattcgctttctcgttagctgcgcttttattaaactctgcgcgattattattggcgaagaaattgcatgcaaaataaattagcttccggtgccaggcttggacgtcaggcgttacttttccctctctgtctggtgctttacgaatttagtacctatatcggcaacgatatgattcaacccggtatgttggccgtggtggaacaatatcaggcgggcattgattgggttcctactagcatgaccgcgtatctggcgggcgggatgtttttacaatggctgctggggccgctgagcgatcgtattggtcgccgtccggtgatgctggcgggagtggtgtggtttatcgtcacctgtctggcaatattgctggcgcaaaacattgaacaattcaccctgttgcgcttcttgcagggcataagcctctgtttcattggcgctgtgggatacgccgcaattcaggaatccttcgaagaggcggtttgtatcaagatcaccgcgctgatggcgaacgtggcgctgattgctccgctacttggtccgctggtgggcgcggcgtggatccatgtgctgccctgggaggggatgtttgttttgtttgccgcattggcagcgatctcctttttcggtctgcaacgagccatgcctgaaaccgccacgcgtataggcgagaaactgagtctgaaagaactcggtcgtgactataagctggtgctgaagaacggccgctttgtggcgggggcgctggcgctgggattcgttagtctgccgttgctggcgtggatcgcccagagcccgattatcatcattaccggcgagcagttgagcagctatgaatatggcttgctgcaagtgcctattttcggggcgttaattgcgggtaacttgctgttagcgcgtctgaccagccgccgcaccgtacgtagcctgattattatgggcggctggccgattatgattggtctattggtcgctgctgcggcaacggttatcagtagccacgcgtatttatggatgactgccgggttaagtatttatgctttcggtattggtctggcgaatgcgggactggtgcgattaaccctgtttgccagcgatatgagtaaaggtacggtttctgccgcgatgggaatgctgcaaatgctgatctttaccgttggtattgaaatcagcaaacatgcctggctgaacgggggcaacggactgtttaatctcttcaaccttgtcaacggaattttgtggctgagcctgatggttatctttttaaaagataaacagatgggaaattctcacgaagggtaaaaaaatgcctgactgctttgtgcgatcaggcattctcgaattaatggtgatggtcgtcaatctggtgttcgataaccatcccttcacctacgctggcaagatggcgaacataaggatgcgggcggtaagccggagctggcgcaggagccacatagacggtttgcggcacagtcgcgacgctgaccgcttgtggaacgctgacactatcaggaaccacaaccactttgtatccactcggcacatcgacggtgacactttgcgccatcgccacaccagtaaagcccattaaaagcgcgcccaacagtagacaatttttcataatcatttcgcctgaaataatgcagcgggttaatttccgcgaattatgcagccttcattcaggcattgtgttgccgggcgtgctgccggttttattggtcaaatggcgcttcgtgtttaagaactttatcgatcacatccagtacgccttcacggttattggagcctgcgcggtattttgccgctgcgacgaccgcgctaccggcattttccattgcaaaactaaagcctgcctgacgcagcatctcaatatcgttaccgccatcgccaaagaccaccacttcgctgtcgtctattccccataatttctgcagttggcgaaggccattggctttatgtacgccggggataatcagatcgatgctgccgttgccggtgtggacgctcaccataatatcgccgatggcctcatgtaatgctttttgtacttgtggaatcagttcatcggaaagattcaggccaaacttaaagaagatatcctctaagttgtcaaagttatcgacgtattccagacggtgataatacatttccgccaccgttttcatggcatcgtcatattttttgagtgtataggcactattttttccgcaggcaataatttccacttccgggcgcgtcagcaaatgttccacgacagtagcaaacgcatccttgcttagctcgccattaaaaacatctttgccttcgctcactacccagccgccgttttcagccacaaaggcaatttcattagcaatttcagggaagaaagagatcaactgataatattgattcccgctggcgactacaaagcgaattccttgcgctttcatttgctgatactgagccataaaccgctcacggttataggttttttgatcgcttaagaaagtaccatccatgtctaccgcaattaatttaatgctcatcaactattctccatcgccgtctgcgttttggtatcgggtttggcgacggctttcgcgacaatagccgcgagaataaccagcgccagtacaaccagcattgcactacgtaatccataatgttcgccgagatagcccagcagcggcggcccgacgaggaaagccagataaccggtcgttgctaccacactgacgcgggttggtgcatcggggccggtatcgctggcggcagaaatggtcagcgggaagcccaggctggcacccagtccccagagtacaacagacaccccagcgacccaggcgctatcgacaaaaataatcagcccaatacccaacgcccccattagtgcactggcccgaaccacggcaacgcgactgtaacggtcgatgaaccaaccgccggtgaagcgtccaacggtcatccccagggtaaaaccggcataaatcaggctgccggaagtagggctaaaaccgtgaccgtcaaccattaataagggtaaccagtcgttggcagaaccttcggcaaaggccatcgccagcaccacaacacctatcagcagcaactggatatcgcgataaaaaggtacgcctttttcgccatgctgggtgccatcggcagcatttttgcccgtaccgtcagggattgcctgaatggcgatataaataggtgcgatacctaccagcgccgccaataaaatgtgcaccgttgccggaacgccaaaggccgtcagtgccatcccgacacctgcgcctgccagcgtgcccaggctataaaaaccgtgcatcatcggcaaaaccgtcttattcatttctcgctcaacggcagcaccttcaacgtttatcgccacttccgcagaaccaaaacttgccccaaagacgccgagaccaacggcaaagagcagggggcttgtcagccagagtgccagacttaatatcatcatcccgatcaatgcgcaggacatcgtgaccaggatgacattacgtgtcccaaagcgtttcactaaccacgcgctgcagagaataccgctcatgctaccgatgctcagaccaaagagaacaccgcccatttcagcgatgctgacagagagaatatcgcggatagcaggcgtacgggttgcccaggacgccattaacaggcctggcaaaaagaagaacataaacagcgcccaggttcggcgtttcaatgcattacgactagaatttacggtcatagatcacgtcaaaataagaagagggaagacaacattagcaaggttgtgtacatttgtacacaattgcagagagaggaaatgacatgcgtcgcgctaacgatccgcaacggcgagaaaaaattatccaggccacgctggaggcggtgaaactttacggaatacatgctgttacgcaccgcaaaattgctacccttgccggggtaccgttgggaagcatgacctactattttagtggaattgatgagttgttactggaggcgttcagcagttttactgagatcatgtcccggcaatatcaggcattttttagcgatgttagtgatgctccgggcgcatgccaggctatcaccgatatgatctacagcagtcaggttgcaacgccggataacatggagctgatgtaccagctctacgcgctggctagccgaaaaccgctattaaaaacggtaatgcaaaactggatgcagcgcagtcagcaaacgctcgaacaatggtttgaacccggaaccgcccgcgcgcttgatgcgtttattgaggggatgacgctgcattttgtcaccgaccgtaagccgctaagccgcgaggagattttgaggatggttgagagggttgcagggtaatagataagttttagataacaaaaaacccatcaaccttgaaccgaaatggcggggttgatgggctccacaaaatggggacatcaaagaaaagcagtggcactaattaagactgatgccctgcggaaaagttctgcggttgtgcaaaaaaatttcattttcagggcaacttcagttttatcctaatcctggccataccatgacgatgattgtccctgccagcgtcagcaggacgttggcgattgcataggtgcccgcatagcccagcgccgggatgttactgcgagctgtatcactgatgatctccattgccggcgcgcaggtacgtgcgcccatcattgcgccgaacaacagcgcgcggttcattcgcaatacataagcaccgaacaagaaacagataaccacgggcaccagactgacaatcaatccggcaatcaacatctgaccgccaatcgcgcccaggccgttattaataccgctaccggcgctcagaccaacgcctgccataaacaccatcaagccgaactctttcaccatgcttaatgcaccctgcggaatgtaaccgaaggtcgggtggttagcacgcataaagcccagcataattccggcgaataacaacccggcagcgttccccatgccgaaactgaatgtgctgaactggaaggtgatcatcccgatcatcagcccaataacaaagaaggcgcagaatgccagcaggtcagtgacctggctgtgaatgctgataaagccgatgcgatcggcgatggtttttacgcggcgggcatcgccgctgacttgtaaaacgtcacctttgttaagcacgacgttgtcatctatcggcatctcaatctggctacgaatgacgcggttaaggaagcaaccgtgatcggtcaacttcagttgtgcgagacgtttacctacagcgttatggtttttaacgaccacttcttcagtgacgatacgcatgtcgagaaggtcacgatcgaaaacttctttaccgttacggaagctgggatcgagtcgggcatgggcgtcgggatagcctaccaacgctatttcatcgcccatttgtagcacggcatcaccgtctggatttgccagaatcccgttacgtcgaatacgttcaatgtagcagccggtttgtcgataaatacccagttcacgcagatttttgccgtcggtccaggccaccagttccgggccgacgcgataggcgcggatcaccggtaaataaaccttacggttggcatcagtgtccaggccacgttcgcgggcgatttgctgggcgctggtctgtaagtcctgatgctgcaatttcggcaagtaacgcgcaccaacaatcaaactcaccagaccgattaaataggttaaggcatacccgaggctcagattatccagtgccagactgagctgcctgctttccatgccggaatgacgcagtgtatcgccagcaccgaccagaaccggtgtgctcgtcatagagcctgctaacataccggccgtcaggccaatatcccagccaaacagcttacctaaccctaaggcgatcaccagcgcactgccaaccatcaccagtgctaacattaggtaatttttcccatcgcgaaaaaaaatggaaaaaaagttcggtccggcttcgaccccgacgcagaaaataaacagcataaagccaagattaagcgcatcggtgttaatgctgaaatgttgttggcctaataacaggcttacgactaaaacgccaatggaattacccagttggatgctaccaagtcgtaactttccgagacatagcccaagcgcgaggaccacaaataataacagaatgtaattcccatttaacaattcggcgacgtttatattcacggaggctaacttcttgtttactagtaagctgttgaaagaaatggtaatttacgataatgttttttaccagaattcagggcgcagattcattcagcgcacctaaacgatagtaaagtaacaatatattttactagtgtaatcacattaggtatcaacggctatatgaattgcgttggcctatattagcatggaatgcgaagcggctttatcttactgaacgccacactggcgaaaaatgtgttcgatagacgcagtgtcaggaggaacgagtgaaacataaacaacgttgggcgggggcaatctgctgttttgtcctcttcattgtggtgtgcctttttctggcgacgcacatgaaaggcgcttttcgggctgccgggcatcctgaaatcggcttgctatttttcattcttcctggagcagtcgccagcttctttagtcagcgtagagaagtcctgaaacctctgtttggcgcaatgctggcggcaccctgtagcatgctcattatgcggctgttttttagtccgacgcgcagtttctggcaagagctggcatggttactaagcgcggtgttctggtgtgcgctgggggcactgtgtttcttatttatcagtagtttgtttaaaccacagcacagaaaaaatcagtaaagccctcaacgcgagggcttgtcagacgatcaggcgtccagattttctttcacccatgcagcaaaatcggtatagccgccgatatgttgctgatcgacaaaaatctgcggcacggtttctacgggtttacctgccttttgttgtagatcttctttagtgatcccttccgcacgaatatctacatactgatactgaaaatcatcgcgttcattgctcaatttctcagccagatcttttgcacgcacacagtaagggcaaccgctacgaccaaaaataacggtttgcattatttctctcctcatagatttatgcctgtaatgatcacgctaaaatgtattcgctgaaagtaggtttaacctgttgcattaattgctaaaagctataactgttaaacacaatacagtgaaaagttttagactgaaggctcactttgcagagggaagcgtatgcgcgcgatcggtaaattgcctaaaggcgtgttgatactggaatttatcggaatgatgctactggcggtggcgctgctgagcgtaagcgactccctgagcctgcctgagccattttctcggccagaagtgcagattctgatgatttttctcggtgttttgctcatgcttcccgctgcggtggtggttattcttcaggtggcaaaacgtcttgccccacagctgatgaaccgtccaccgcaatatagtcgtagtgaaagagaaaaagataatgacgccaaccattgaacttatttgtggccatcgctccattcgccatttcactgatgaacccatttccgaagcgcagcgtgaggcgattattaacagcgcccgtgcgacgtccagttccagttttttgcagtgcagtagcattattcgcattaccgacaaagcgttacgtgaagaactggtgacgctgaccggcgggcaaaaacacgtagcgcaagcggcggagttctgggtgttctgtgccgactttaaccgccatttacagatctgtccggatgctcagctcggcctggcggaacaactgttgctcggtgtcgttgatacggcaatgatggcgcagaatgcattaatcgcagcggaaagcctgggattgggcggggtatatatcggcggcctgcgcaataatattgaagcggtgacgaaactgcttaaattaccgcagcatgttctgccgctgtttgggctgtgccttggctggcctgcggataatccggatcttaagccgcgtttaccggcctccattttggtgcatgaaaacagctatcaaccgctggataaaggcgcactggcgcagtatgacgagcaactggcggaatattacctcacccgtggcagcaataatcgccgggatacctggagcgatcatatccgccgaacaatcattaaagaaagccgcccatttattctggattatttgcacaaacagggttgggcgacgcgctaaaaccgccacgtcgatgtatgatacgcgggcttttgaccaggtctgacagagaggtgcagggtgaaaattgccatattgtcccgggatggaacgctctatagctgtaagcggctgcgtgaagccgctatacagcgcggtcacctggttgaaattcttgatccgctttcttgctacatgaacataaatcctgcggcgtcttctattcactacaaaggccgcaagttaccccattttgacgcagtgatcccgcgtattggcaccgccattaccttttatgggacggcggcactgcgccagttcgagatgctggggagctatccgctcaatgagagcgtcgccattgcccgggcgcgtgacaaattgcgttccatgcaactgctggcgcgtcagggcatcgacctgcctgtcacgggcattgcgcatagcccggatgataccagcgatttaatcgacatggtcggtggtgcgccgctggtggtcaagttggttgaaggcacgcagggaattggcgtcgtgctggcggagacgcgtcaggcggcggaaagcgtgattgacgctttccgcggtctgaacgcgcatattctggtgcaggaatatatcaaagaggcgcaagggtgcgatatccgctgtctggttgttggcgatgaagtggtcgctgcgattgaacggcgggcgaaagagggcgattttcgttccaatttgcatcgtggcggcgcggcaagcgtcgccagtatcacaccacaggagcgtgaaatcgcgataaaagccgcgcgaacgatggcgctggacgttgctggtgtggatattctgcgtgctaatcgcgggccgttggtgatggaggtgaatgcgagcccggggctggaaggaatagaaaaaaccaccggtatcgacatcgcgggtaaaatgatccgctggatcgaacgccacgctacgacagaatattgcctgaaaacgggtggttaatcgcaatcacattactgatcatggttttgcctgcgctttttgcgtaagctgtgccggtctttttatcgaaagaggttgtacaaaattatgacaagcctggtcgttcctggtctggatacgctgcgtcaatggctcgatgacctggggatgagtttttttgaatgtgataactgtcaggctctgcatctgccccatatgcagaatttcgacggtgtctttgatgccaaaatcgatctgatcgataacacgatcctgttttctgccatggcggaagtccgacctagtgccgtattgccgctggcggcggatttatctgccatcaatgccagtagcctgaccgtgaaagcatttcttgatatgcaggatgataatctgccaaagctggtggtttgccagtctttatccgttatgcagggcgtaacctatgagcagtttgcatggttcgtgcgtcagagcgaagagcagattagcatggtcattcttgaagctaatgcccatcaactgctgttaccgactgatgatgaagggcaaaacaacgttaccgaaaactatttcctccactgataactcctttcgagcacgcagtcgctggtgcagtggctgcgcgctgcaaaattatctgctgtttttaaccttttcttaaagattatttcacttctcttgtgtcgatttggctttatcacatagagcaaatatgcataaaaatttgttaaataccgttttttaatccgagctatagtctcaaaccctggctaaagttattcttgcgatgcttttatatagcgagcagtgctggccgggagaaagttctcttttcttacaccgcgccgataaaaaatatgcacgtttattgcatatctttcagtgtgacaacttttgttcgtttgttaacgaactttcagaaggaaagagatatgaccgccttaaataaaaaatggctaagcggtctggttgcgggtgctctgatggccgtctctgtcggcacgctcgcggctgaacaaaaaacactccacatttataactggtctgattatatcgccccggacacggtggccaattttgaaaaagaaaccggtattaaagtcgtctacgatgttttcgactctaacgaagtactggaaggcaaattaatggccgggagtaccggctttgatctggtggttccatctgccagctttctggagcgccagttgactgcgggagttttccagccgctggacaaaagcaaattgccggagtggaagaatctcgacccggaactgctgaagctggtcgccaaacacgatcccgacaataaatttgctatgccctatatgtgggcgacgaccgggattggctataacgttgataaagttaaagcggtgctgggcgaaaacgcgcccgtcgatagctgggacttgatcctcaaacctgaaaatctggaaaaactgaaaagctgcggtgtctctttcctggatgcgccagaagaagtttttgctaccgtgttgaattatctcggcaaagatcccaacagcactaaagcggatgattacaccggaccggcaacagatctgctgttaaagctgcgcccgaacattcgttatttccatagttctcaatacattaacgacctggcaaacggcgatatttgcgtcgctatcggctgggcaggtgatgtctggcaggcgagtaaccgcgcgaaggaagcgaagaatggcgtgaatgtcagcttcagcattccaaaagaaggggcgatggcgttctttgatgtattcgccatgcctgcggatgccaaaaacaaagacgaagcctatcagttcctgaattacctgctgcgcccggatgtagtagcgcatatttccgaccatgtgttctatgccaacgccaataaagcagccacgccgctggtgagtgcggaagtccgtgagaacccaggtatttatccgcctgcggatgttcgtgcgaagctgttcactctgaaagtgcaggatccgaaaatcgaccgtgtgcgcacccgcgcgtggaccaaagtgaagagcggaaaataatccgcagtcgtagatgccggaggggcgcaccacacccgccggcaattcgcaccattatggtgcgcttgcacacattcaatgccggagagcagccgtgaatgacgctatccctcgcccgcaggcgaaaacccgtaaggcgctgacgccgctattagaaatccgcaacctgaccaaatcctacgatggtcaacatgcggtggatgatgtcagcctgaccatctacaaaggtgaaatcttcgcgctgctgggcgcatccggctgtggcaagtccacgctgctgcgtatgctggcaggtttcgaacaaccttctgccggacagataatgcttgatggcgtcgatttgagtcaggttccgccttacctgcgccccatcaatatgatgtttcagtcttacgcgctgtttccgcatatgaccgtggaacagaacatcgcttttggcctgaaacaggacaaactaccgaaagcggaaattgccagccgggtcaatgagatgctcggcctggtgcatatgcaggagttcgccaaacgcaaaccgcatcagctttccggtggtcagcgacaacgtgtggccctggcccgaagccttgcgaagcgcccgaaactattactgctcgatgagccgatgggcgcgctggataaaaagctgcgtgacaggatgcagcttgaagtggtggatattctggagcgcgtcggtgtgacttgtgtgatggtcacccacgatcaggaagaggcgatgaccatggcggggcgcatcgccattatgaatcgtgggaaatttgtccagattggcgaaccggaagagatctacgagcatccgactacccgctatagcgccgaatttattggcagcgtaaacgtctttgaaggcgtactcaaagagcgtcaggaagatggcctggtgcttgatagcccggggctggtgcatccactgaaagtcgacgcggatgccagcgtggtcgataacgtgccggtacatgtggcgctgcgcccggaaaaaatcatgctttgcgaagagccgcccgccaatggttgtaacttcgcggtgggggaggtgatacacattgcctatctcggcgatcttagcgtgcatcacgttcgtctgaaaagtgggcagatgattagcgcccagctacaaaacgcccatcgtcatcgtaaagggttaccgacctggggcgacgaagtgcgtttgtgctgggaagtggacagctgtgtggtgctgacggtttaaggagcaaagatgagtacacttgaacctgctgcccagagcaaaccgccgggcggatttaagctgtggttgagccagctgcaaatgaagcatgggcgcaaactggtcattgcgttgccatatatctggttgatcttgctgtttctgctgccatttctgattgtctttaaaataagcctggcggagatggcgcgcgctattccaccttataccgaactgatggagtgggctgacgggcaactgtccatcactcttaatctcggtaattttctgcaactgaccgacgatccgctctatttcgatgcttatctccagagcctacaggtggctgcgattagcacattttgctgtttactgatcggctatccgctggcgtgggcggtggcgcacagtaagcctagcacccgtaatattttattactactggtgatcctgccgagctggaccagctttctgatccgcgtttatgcctggatgggaatattaaaaaacaacggtgtgctgaataattttctgctgtggctgggggttatcgatcaaccgctgaccattctgcataccaatctggccgtttatatcggcattgtttacgcttacgtgccgtttatggtactgccgatttataccgcgttgattcgtattgattatagcctggtggaagcagcgctggatctcggtgcacgaccgctgaaaacgttctttactgtgatcgtgccgctgactaaaggtgggattattgccggaagcatgctggtgtttatcccggctgtgggcgagtttgtgatcccggaactgctcggtggcccggacagcatcatgatcgggcgcgtgctatggcaagagtttttcaataaccgcgactggccggtggccagcgcggtagcgatcatcatgttgctgctgctaattgtgccgataatgtggttccacaaacaccagcaaaaaagcgtgggagaacacggatgaataatttaccggtagttcgtagcccctggcggattgtgattttgctgctgggctttacctttctctacgcgccaatgctgatgctggttatctatagctttaacagcagcaagctggtgacggtgtgggccggctggagtacgcgctggtatggtgagttattgcgcgatgacgcgatgatgagtgcggttggtttaagtctgacaattgcggcctgtgcggcgacggcggcggcgatcctcggaactattgcggcggtggtgctggtgcgctttggcaggtttcgcggaagtaatggctttgcctttatgatcaccgcgccgctggtaatgccagatgtcatcacgggcttgagcctgttgttattattcgtcgcgcttgctcatgccattggctggcctgcggaccgcggtatgctcaccatctggctggcgcatgtcactttttgtacggcttatgtggcggtcgttatttctagtagattgcgggaactggatcgcagcatagaagaagcagcgatggatctcggtgcgacgccgctgaaagtgtttttcgtcattacgctaccgatgatcatgcccgcgatcatttctggctggttactggcttttactttgagccttgatgatctggtgatcgccagctttgtttccgggccgggagccaccacgttaccgatgctggtcttttccagcgtgcggatgggggtgaatccggaaatcaacgccctggcaacattgatcctcggcgcggtcggaattgtcggatttatcgcctggtatctgatggctcgcgcagaaaaacagcggatacgcgacatccagcgtgcaagacgtggctgaagacactaaaatttgccaacctggctacataatgccgcgcatgtcgcggcattgttttcatggaagacgaaacgttgggattttttaagaaaacatctagttctcatgctcgcctgaatgtgcctgcgctggtgcaggtggcggcgctcgccattattatgatccgtggcctcgacgtgctgatgattttcaatacgctgggcgtgcgcggtattggcgagttcattcatcgcagcgtacaaacctggagtttaacgctggtctttttaagcagtctggtgctggttttcattgagatctggtgtgcgtttagtctggtgaaagggcgtcgctgggcgcgctggctatatctgctgacacaaatcaccgccgcaagttacttgtgggcggctagcctggggtacggttatccggagctgttcagcattcccggtgaaagtaaacgtgaaatcttccatagcctgatgctgcagaagctgccggatatgctcatcctgatgctgctgttcgttcccagcaccagtcggcggttcttccagttgcaataatgtgtataatcgtcgcccctgatgatgtgaaggtcaatgtatgcagtgcgcactttacgacgcgggtcgctgtcgttcctgtcagtggataatgcagccgattccagagcaactctccgctaaaaccgccgatcttaaaaatctgctcgccgactttccggttgaggaatggtgcgcgccggtgagtggcccggaacaagggtttcgtaataaagccaaaatggtggtgagtggtagcgttgaaaaaccactgctcggtatgctgcatcgcgatggcacaccagaagacctttgtgactgcccgctttatcctgccagttttgcgcccgtttttgcggcgctaaaaccgtttatcgcccgagcggggttaacgccctacaacgtggcgcgtaagcgtggcgaactgaaatacattctgctgactgaaagccagagtgatggaggcatgatgctgcgctttgtactgcgttctgataccaagctggcgcaactgcgtaaggcgctgccgtggttacacgaacaactaccgcagctgaaagttattaccgtcaatattcagccggtacatatggcgattatggaaggggagacggagatctacctgaccgaacaacaggcactggcggagcgttttaatgacgtaccgctgtggatccgtccgcaaagtttcttccagactaatccggcggtcgccagccagttgtacgccaccgcgcgcgactgggtacgacagctgccggttaaacatatgtgggatctgttctgcggtgtggggggctttggtttacactgcgcgacgcctgacatgcagttaaccgggatcgaaattgcaagtgaggccattgcctgtgcaaagcagagtgccgctgaactgggcttaacgcgtttgcaatttcaggcgctggactccactcagtttgccaccgctcagggggatgtgccggagctggtgctggttaacccgccgcgccgcggcattggtaaaccgctgtgtgattatctcagtacgatggcaccgcgttttatcatctactccagctgtaacgcccaaactatggcgaaagatatccgcgaactgcctgggtttcgtattgaacgggtgcagcttttcgatatgttcccgcataccgcgcactatgaagtgctgacgctgctggtgaagcaataaaaaagccgcatgtgcggcttcagattgctgacaaagtgcgcgttgtttatgccggatgcggcgtaaacgccttatccggcctacaaaagcgtgcaaattcaatacattgcatgggccatgtaggcctgataagcgtagcgcatcaggcaattttacctttgtcatcagtctcaagccgcggttgcggctttctgaatcttactgtgggaaccactggtcactgattttttgataagtaccgtcagctttaattgctgccagcgcgttattcagtttttccagcagggctttgttatccggacgtacagcgatgcccaggccggtgccaaaatattgcggatcggtcactttctcagtagcaacaccaagttgtggattggttttcagccattcgtttaccaccgctgtgtcaccaaataccccatcaatacgaccatttttcagatcgataaaggcattctgataactgtcataagagacagttttcacttccgggtgctgatcctgaatatatttctggtgcgtagtaccgttttccatcccaatacgtttgcctttcagatcggcaaacgttttgtaggtatcttttttggcaatcacgacggcactgttttcatagtagggcgtggtaaagcttacctgtttgctacgctccggggtgatatccataccggagattacggcgtcatattttctgaatttcagggacgggatcaggctgtcgaacgcgtgattagtaaaagtacattctgcctgcatttgtttgcacaaggcttttgccagatcgatatcaaagccgacaatctcattattagcacctatagattcaaagggtggataggtggcactaacgccaaaattgattttctctgcggcagaagcaccgaaagtaaaggaagcaagtaaagcggcaagaactaactttttcatgatggaactcccgtctgtcaatcttatgatttttggccgtgtctgcggcatgggataacaatgccatcaagtgaatttatatgcaataaacatgattaaataatttaaatgaaataaaaaagacggacaacttagtgggttgtccgtcttcattataagaatttatgcactatgtaggccggataaggcgtccccgccgcatccggcacaggcaccgtgctgatgtctgatgcgacgctggcgcgtcttatcagacctacaaaaccccccggcgaatgtacgcagccacattaatttcgccgttcgaatgccagcgctttgcgctcgatcagacgcatcatcagcgtcagcaggccgttaacgaccaggtaaataatccctgccgcaccgaacaccattacatcgtaggtgcgtccgtacaacaactggctgtatcccatcacttccatcagcgtaatggtgtatgccagagaggtacttttgaataccagcaccacttcgttggaataagaagagaggctgcgtttaaaggcatacggcagcaggatcgccagcgtatcttttttgctcattcccagggcgctacaggactgccactgaccttccgggatcgcacgaattgcaccgtaaaacagctgcgtggtatacgccgcactattcaggctcaacgcaatcagcgcacataaccacggttcactcaacaaatgccacagtgccggatactcctgcaaagtcggaaactggcccggcccgtaataaatcaggaagatctgcaccagcagcggcgtaccggtaaacagcgtgatataaccccgcaccagccacaccagcaccggcgttttcagcgtcaggatgatggtaaaaatcaatgccagaatcagtgccacaatcaggctggcaacggttagcgtcaggctggtgtgtagccctttcatcagttcgggtaaatactcaaacattagctgggcctccgctcaaaacgtgtcgcgcgcaggtcaatgcgtttgagaatgtactgactgagcagggtgatcaccaggtaaatcgccgccgccacaatgtaccaggtaaatggttcctgggtacgagtagcgatgctttttgtttgcagcattaaatcattcacactaatcaaactgaccagcgcggtatctttcagcagcaccagccactggttaccgaggccaggcagcgcatgacgccacatctgcggcatcaccagacggaaaaagatagcgcttttgctcagccccagcgcctgaccagactcccactgacccaccggcaccgctttcaacgcgccccgaagcgtttggctggcataggcggcatacagcagactcagagcgatgacaccacaaaggaacgggctaacgtcgaagttctcaatgtccatctgcactgggatctgcacgaacccaagattgatagtgaagccatcgctaagcgtcagcagcagctggctggagccaaaatagataaacagcaccaccagaatttctggcaggccacgcagaatggttaccagcgcactacctgcccacgcgacaggacgccattttgcgctctcccataccgcaaagaacatcgccagcgccagcccgacaatcaatgcacaaacggcaaggccgacggtcatcccggcggcgcttgctaaaggaaaaaattcattcatcaggaattacttctggaaccatttgttgtagatggtttcgtaagtgccatctttcttcactttttccagcgcagtgttgagtttctgctgcagctcagtgttgccctgacgtaccgcgatgccgaggccagtgccgaagtaatctttatcggtcactttgtcgcccaccgccgccagtttcgggttatctttcagccactcagtgaccactgcggtgtcaccgaagacgccgtcgatacgcccgttttgcagatccagttttgcgttctggtagctgtcatacggaacggtagtgatttccgggtgcttatccataatgaatttctggtgtgtcgtcccgttctgtacgccgacttttttgcctttcagctgatcaacactggtgtatttgccttgctgacccacaaacagggcagagttgtcatagtacggggtggtaaacagcacctgcttttcacgctccggagtgatatccatgcccgccatcacggcttctacgcgacggaatttcaggcttgggatcaggctgtcaaacgcctggttagagaaagtgcaggttgcatcaatctctttacacagcgcttgtgccaggtcgacgtcaaaaccaacgatctggttgtttgcatcaatgctttcaaacggaggataggaggcttcggtagcaaaacgaatggtttcggcagctgtggcggaaagactaaaacctgcaattaacgcggcaatcagaacttttttcattgttgttatcccgaatcttagtgagagagatagtttttaaatgcttcggtttgcggctcggtaaagcagctcgcgtcgccttgttctacgatatgaccattttccatatacaccactcggctggcggttttacgcgccacttcaacttcgtgggtgacgatcacctgggtaatattcgtttctgccagctcacgaatgatgctgacgatttgtgccgtaatttccgggtccagtgcggcggtcggttcatcgaacagcagtacctgcggttccatcatcaacgcacgggcaatagcaacacgctgctgctgaccaccagaaagatgcagcgggtaacgatcgctataaggtttgagacgcagacgttccagcagtttttctgcacgggccagcgcctgatctttactcaaccccagtacacggcagggcgcttcaatcaggttttgctgcacggtcagatgcggccacaggttgtattgctgaaacaccatgccaacgttacgacgcaaatcgcgaatcgctttgtcagagggtgttttggtgaaatcgaaatggttgcctgcaatgttgagcgtaccggagcgcggcatctcaagcagattgagtacacgcagcaggctgcttttacccgcgccgctggggccaagtaacaccagcgtttcgccctgtgggcaatccagcgtgatatcgaacagcgcctgatgcgcgccgtagaagcaattaatgccgtttaattgaatactcattgacactcgtatactggcagtctgatagctattgaggtcgaagatagtacctttgacagaataattatgcaatatttctgctttaaaagttaaaagcaaagcgcattattcaataaacatagcacaaaataacgggggcggtggtcggcgagcataaatgtcggcattcctcacgaaatgccggacaatttacggggtttattggttgatcaaggcgttagcgattctcgatggactgacggagcgtacccgccgtggcatgaacgctaccgcctaagtaacgcacatcgtcgatgacccaacactggccttcctgaatcattaacacttcatcctgccaaccctggtcaccctgtttgagatccacgcgcaatggaatgttacgggcatcacgattagggatagtgcttgcactggcaacgtgggcgctatctggcaaggtggttcgactggagaatggatcgttggtcagtagttcccgatggttattatcccgggaggcatcgctaagcagtgtcgccagtttgtcgctcagataagggcgcaaggcggtgatgtcgttgctgcggtgcaaaatgcggtagtcataaaattgctgggccacgttatccgggcctccttcaacgcaaggaccactgcgtgtgccgttatctttataagctggagtgactgtggtgcaggcactgaggagcagtgcgcaggggataagcattgtcaatttgctgtagcgcataatgatttccttataagcgatcgctctgaaagcgttctacgataataatgatatcctttcaataatagcgtatcagtctgataatgcttttgagatcgaaggcttagcaaacaaggagatcgatcatgcaattttctacaaccccaactctggaaggccagaccatcgttgaatattgcggtgtggtgaccggcgaagcgattttaggtgccaatattttccgtgatttctttgccggtatccgcgatatcgttggcggacgttccggtgcgtatgaaaaagaactgcgtaaagcacgggagatcgcctttgaggaattaggctcccaggcgcgggcgctgggggccgatgccgtcgtcggtattgatatcgactacgaaacggtcgggcaaaacggcagtatgctgatggttagcgtcagcggtacggcggtgaaaacgcgtcgatgagaagattcttctggctggtcgctgccgctctgttattggcagggtgtgcaggcgaaaaaggcattgtcgagaaagagggatatcagcttgatacccgacgccaggcgcaggcggcgtatccgcgcattaaagtgctggtgatccactacaccgcagatgattttgatagcagcctggcgacactgaccgataagcaggtcagcagccattatctggtccctgcggtaccaccgcgatacaacggtaaaccgcgcatctggcaactggtgccggaacaagaactggcctggcatgcggggattagcgcctggcgcggggcaacgcgccttaacgacacctctattggcattgagctggaaaaccgtggctggcaaaaaagcgccggagtgaaatattttgccccgtttgaaccggcacagattcaggcgcttattccactggcgaaagatattattgcccgttatcacatcaagccggaaaacgtagtggcacatgcggatatcgcaccgcagcgcaaagacgatccggggccattatttccctggcagcaactggcgcagcaggggattggtgcctggccggatgcgcagcgggttaacttttaccttgccgggcgcgcgccgcacacaccggtagataccgcgagtttgctggagcttttggcgcgctacggttatgacgttaaacctgatatgacaccgcgcgagcagcggcgcgtgattatggcattccagatgcatttccgcccgacgttatataacggcgaagcggatgcagaaactcaggcgattgccgaagcattgctggagaaatacgggcaggattaacgcggcagttttccgtggtcgcgtagccaggcggcagttttctcgataccttcatccagggtgatgaccggctgataacctaactcttcctgcgcacgcgtaatatccagcgtaaagtcaaaattcaacttggagacgccgtagtgggtcagcggcggctcttttgcactcttgcggcctaaacgctccatgctgcgggcgatcatatccagcatcgggtaggggacggaacgaatacgacagtcaatattcaactcgtcgatcagcttctgcacgatgctgcgcagtgtgcgatgctcgccgttggtgatgttgtacacacgcccggaaggtagcttatcgcaggcttcctggcttgccagccacattgcgtgcacggcattttcatagtaggtcatatcgaccagcgcactgccgccatgcggtaacagaatactgccgtagtggtgcatcatatgcgccagacggggaataaagactttatcgtgcggtccgaacagactttgtgggcgcagaatagtaaagcgcgtttgtggattcgcctggctaagcatattgatcacttcttcgctggctgctttgctgcgggcaaactcgttggcgaagcggtgagggcgaaaatcttctttaatatcgcgatggtggtgataatcgaagtacagggagggggaagagatatgaataaagttacgcacaccccaggcgacagcccattcacccaggcggcgagtggcgcgaacgttagccagatcgaaagcctgttgtgtcccccagggactggtaaagctggagcagtgccacagcgtatcaatgcccgcgagcatcactttagcttgactactaaccagctcggtcagatccgccggaacaaactctgcgcccattttttccagcaatttgcccattgcctcgttgcgaccggtcgctcgcacgctgatgcctttctggcataaaaactctaccgcgtttcgacctaagccgctggtggcgccggtaaccagtaccttcatatcaatccactgttgttgagaaaataacgtgcgcattcttccgtgatttcccccatgatgcaatgggaaacatgaaagaataacgcaggttttgtcgattaatctgtgctttgttctgccagtctggcgatttgttttgccattccgcgaaaaataaacagatgcgcggggatcatcaataaccagtaaaacagccccggcataccgtgcggatgccagaaagcgcggacatcgatagtacgatagtcgcctttatcttccaggctaaaacacagtcgtcccagccccggcgctttcatgccaaataacaacgtaagttgtttttccggttcaacgacaatcactttccagctatccaccgcatcgccagtctgtaaatattcgcgctccgggcggcctttcgccagcttatgaccgatcgcgcggtccatcaacgcccgtgtctgccacaaaatattgccaaagaaataacgctctttaccgccgatttggttcactacctgccataaagcagcaaggctggcggacgttttaacggtaaaccccgcctgtttggcaaaataaccgtactccggtcgccagcgggcaaaggcctgagcgtcgtagccccagtcgctggagttgaccagtttttcctcctctttcaacgtgctacgtaccgcgtcatcgaaagcgatcagccgttgtgggatgagtgcacgtagcgcggtatcatccgccagcagatcgtgtttcagcccctgaatcaacgccctggcggtggtgggcggtacggaagtaatcacattgagaaaccacacgctaatccagcgggtggggagggggatggggatcaaccagcggcgcttaccgctcaccgccataaaatgttcaaactgttgctgataactgagcacctctggtccggcggcttcgaagatgcggtgttcgctggccggatgatctaacaacgcaaccagatagtgcagcaagttttccagcgcaatgggcgtggtgcgactacgaacccagcgcggaggcgttaagactggcaggttgtagaccatatcgcgcatgacttcgaacgccgcggaacctgcgccaacgataattccggcccgcagttcggtcacgggtacattcgcttcacgcagaatgtccgccgtagcctgacgagcacgcagatgatcgctctgctcatgtggcggggcctgcaagctactaagaaagattaattgcttaactggtacttcacgtagcgcatcgcggacgttgagagccacctggcgctcctgagcgataaaatcgccgccttcgcccatgctgtgcaccagaaaatagaccgtatcgatatcctgcaacagggccggtaggttatccggccagctgagatcgactttatggcaactgacgtttgccagttgcagctttgcaagcctgtcgacatgacgtgccgccgccaggatctgatgcccttgctggctgagtgtgcgcaccagatgctgaccaatgtagccactggcaccgagaactaaaatgcgttgcggcacgtctctctccttaacgcgccaggaatgcacgccagtgggcggcgacttccgccagttgttcgcggctgacgtcaagatgcgtcaccaggcggacaatcgggctggcgttaatcagcacgtttctcgctttcatgtattcgcctaacgcggcagcattttcttccccgacgcgaacaaacagcatattggtgtcctgacgcatcacatccgcgcctgcttcacgcagctgctccgccatccaggcagcgttgtcgtggtcttcctgcaagcgcgcaacgttatttttcagggcatatatcccggcggcagccagaatgccggactggcgcatcccgccacctgtcattttccgccagcgaatggcacgtttaatgtaatcacgattaccgacgagtaaactaccgactggcgtcccaagacctttgctcaggcaaatggtgaagctatcacaatattgcgtgatctctttcagttcgcagccgtaagccaccacggcattaaagatgcgcgcaccgtcaacatgcagcgccagattgcgctcgcgggtaaattcccatgcttctttcaggtattcccgcggcaacactttgccgttgtgggtgttttccagactgagtaatttggtgcgggcgaaatggatatcgtcgggtttgattttcatcgccactttatccagcggtagcgtgccgtcggcagccgcgtctatgggttgcggttgaatactgcccagcaccgccgcgccaccggcttcaaacagatagttatgcgcggcctgaccgacaatatactcttcgccgcgttcgcagtgactgagcagagcgaccaggttggcctgagtgccggtaggcagaaaaatggcggcttctttaccggaaagctctgctgcgtagtcctgcagagcattaacggtagggtcgtctccgtaaacgtcgtccccaaccggggcggccatcatcgcttcgagcatggcgcggcttggtcgggtaacggtatcactgcgtaaatcaatcatggcatgtccttattatgacgggaaatgccaccctttttaccttagccagtttgttttcgccagttcgatcacttcatcaccgcgtccgctgatgattgcgcgcagcatatacaggctgaaacctttggcctgttcgagtttgatctgcggtggaatggctaactcttctttggcgaccaccacatccaccaacaccggaccgtcgatggagaaggcgcgttgcagggcttcatcaacttcagacgctttttctacacggatacccgtaatgccgcacgcttcggcaatgcgggcaaagtttgtgtcgtgtagttcggtgccgtcagtcaaatagccaccagctttcatctccatcgccacaaagcccagcacgctgttgttaaagacgacaattttcactggcagtttcatctgcactacactgaggaaatcgcccatcaacatgctaaaaccgccatcgccgcacatggcgaccacctgacgttctggctctgtcgcctgcgcacccagcgcctgcggcatggcgttagccatgctaccgtggttaaagctacctaacaggcgacgcttgccgttcatttttagataacgtgccgcccacaccgttggcgtaccaacgtcacaggtgaaaatagcgtcatcggcggcaaaatgactaatttgctgcgccagatattgcgggtgaatggctttctcgctcggtttagctaaatcgtccagccctttgcgggcgtcgcggtaatcttccagcgctttatccagaaacttgcgatcggctttttcttccaccaatggaagcaatgcacgcagagtgctcttgatatcgccgaccagtgccatatccaccttgctgtgagcgccgatgctggctgggttgatatcaatctgaatgattttggcatcggtcgggtagaaggcgcggtagggaaattgcgtgccgagtagcactaacgtgtcggcgttcatcatggtatggaaaccactgctgaagccgattaacccggtcattccaacatcatacggattatcgtattcgacatgttctttaccgcgcagggcatgaacaataggcgctttaattttcccggcaaactcaactaactctttatgcgcccccgcgcagccgctgccacacatcagggcgatattgctggaataacgcagcagttgcgccagtttgcgtaactcttcttcttccggcgtcacgactggttgtggcgcatgataccagtgcatggttgccccttctggcgcaggttttaacgccacgtcgcctggtaacacgacaacgctaacgccacggttaagcaccgctttgcgcatggcaatcgccagtacttgtgggatctgctccgggctggaaaccagctcgcaatagtgactacattcgcggaatagctcttgtgggtgggtttcctggaaatagccgctgccaatttcgctggagggaatatgagcggcaatcgccagtaccggaacgtgattgcggtggcaatcgaacaggccgttgattaagtgcaggttgccggggccgcagcttccggcgcagaccgccagttctccgctaagttgtgcttcagcgccagcggcaaaggccgccacttcttcgtggcgggtggacatccactcgatggtgcccatgcgattaagactgtcactaagaccgttcagagagtcgcctgtgactccccagatgcgtttcacccctgcgctttcgagtgttttggcgatataagctgcaaccgtttgtttcatggttctccatctcctgaatgtgataacggtaacaagtttagttcatctgacggagggggaagggatgggagagaaaggaggcactaacggttaaatagcccgatgaaaggaatatcatcgggcataaggcgattatgcgagaaccaaatccccctgcggatggcaggagcaggccagtacgtaaccttcagcgatttcggcgtcggtcagcgtcattgtgctgctcaccgtatattcaccggaaaccacttttgtcttacagcagccgcaaacacccgcacggcaggcagcgacaaccggaacgttattgctttccagcgcctccagtagcgtggtgccaaccggggcgtaaaattctcgtgccggttgcagtttggtgaatttcagaccgctggtcgccgcttctgctactggggtgaagaatttctctttaaagaaacgcgtcacgccgagcgctttcacttcctgctctacccaatccatatacggagccgggccgcaggtcatcacggtacgactagctaagtcaggtacacctgccagcagttcgcgagtgagacgaccagcgataaagccttcggtaacgttattttctgccaccagcgttaccggatagttacgccactcatcggcgaaaataacatcctgcggcgtacgcacgttgtagatcacccgcacatcggcctctgtggacggttcttcgcaagccagcgacgcatgctcataatcggcgtgacgccgcagcctgccgccagcaacaggaatttatcttctgctttatcgtcgcaggtaaattcccccatcgcgtcgctaagccagagataatcaccgcgttttacatcgcgcgtcagccactgggagccgacaccgtcatcaatccgccgcacggtcagggtgatatattcactcacgcctggcgtggaggaaatggtgtaagcacgcagcgtttccgcactgtttcgcacgctgaccagtgcatattgcccggcgcgatatgggtagtaatcgtggcaaatcagggaaatcgtccacacatccggcgtttcttgcgtaatgtgatgaacctgcatccgccacgggcattgattcgttggcatcgtcatcgacaaactccttacgcgctcaacagttgcttcatgtcttcttcaacagtggtgatagaacgcaggccgaatttctcgttcagcaccgccagcaggtctggtgtcaggaaaccaggtgcagtcgggccggtgacgatatttttcacgcccagagaaagcagcgtcagcagaatgacgatcgctttctgttcaaaccaggagagcaccaggctcagcggcagatcgttgacaccgcagcccagtttctctgccagagtgacagccagaataatcgcactgtaagcatcgttacattgacctgcatctaccagacgcggcagaccttcgatatcgccaaactcaagtttgttaaagcgatatttaccacaggcgagggtcaggatcaggcagtcatccggcacgctggtggcgaaatcggtgaagtagtggcgctcgccgcgtgcgccgtcacagccaccaagcaggaagatatgacgcagtttttcacggctcaccagatcaatcagcgtatcagcagcgccaagcagcgtctggcgaccaaaacccacggtgataaggtgcggaatttcgctgtacgggaagcctgccatctgttgcgcctgggtgataaccgcagagaaatcatcaccgtccagatgacgcacgccaggccagccaacaatgctgcgggtccagatacgatcgtcataagcgcctacggttgggtcgatgatgcagttgctggtcatcacgatggggccagggaaacgagcgaactccacttgctgattctgccagccgctgccgtagttaccgaccagatgcttgaatttacgcagctccgggtagccatgcgcaggcagcatttcgccgtgggtgtagacattaacgcccgtgccttcggtctgttccagcaggttgtagagatctttgagatcgtgaccggaaatcagaatgcatttacccgccgtcgctttgacgttgacctgggttggcgtcgggtgaccgtatttaccggtttcgcctgcatccagaatgctcatcactttgaagttcatctggccgatttccatactacactcaagaagcgcgttcatatcggcaggccaggtccccagccacgccatgattttatggtactgggcataaatatcgttgtcgtattgaccgagaacatgcgcgtgttccatataggccgccgcacctttcaggccatacaggcacagcagacgcaggccgagaatgttttcgccaatcgccgctttatctttgttaggggtaaattctgctgcctgacgttgcagctcgccgagatcgtcgctcaccagttgcaggtcagccatcgggttatcgacgcgcgcgttggcatctacagccaggcattgcgctttcagcgcctcgcgcagggcaatcgcttcacgagcgtagccgacaatacgcggagaatcgaagttaacgttggtcagggtactgaaaaaggcacgtggcgcgaagctgtcaacatcgtggttgatgatgccgtattcacgcgcttttaccgcccaggcagaaagcccttgcagcgccgcgatgagtaaatcctgaaggtcagaagtttccgccgttttaccacacatcccctgcgcgtaactgcagccgtttcctgccggagtacggatagtttgttcacattgcacacaaaacatgatcacaccttttaaagttatatttaatatacatgtttaaggttaagacgcttaacgcggggataaaagggatttttcatgcaactttaagggagattgatttagcgcaattttggcggcagggatctaccgccagagaggtattacgcagagaaaaaggcgatgaggatcggcactaacaggctaagaataaaaccgtgaacaattgccgccgggaccatatccagcccgccagtacgttgaagaacgggcagggtgaaatccatacttgtggcaccgcataagcccagtgcagtagagcggctgcggcgaatcagcccagggatcaacataatagcaatcagttcacgggccagatcattaaaaaacgccgcgctcccgattaccggaccaaaagattcggtcaataaaataccggaaagagaataccagccgaaaccggaggccattgccagcgcggtattgatggggagatcaagaataaaggcgttaattaaaccaccaattaaactactgacaaccaccaccacggcgacaatcattccccggcgattaaggacaatctgctttaaggtcatgccattattgcgcaactgaataccaacgaggaaaagtagcaaaattaacgtgtattcactggcttcggtcgcgtgttgtaagaaagccagtccacttagaccaatggcaaaaccaatcactactacgccgcacagttttaggctctccagcgccatcgcaatacggctcgggagtttttcttgctgatggtggttgcgccacggcaggcctcgctccagccacatcagggcggcaatattacacagtaaaataacggtaatactgacggcagaataatgcagaatcgccaacaggttactggcgaggttatcgagaaacgccagactgatacccataaaaaagagaataaggtaaaccatccagcttaatagctgattaataacttttaacgcagcttgttggcgaagcggaatgaggtaacccacaatcaggggaaccagaatgattaacagcccagaaaacatgaaaacccagtccttgcaaagatgaagtcgaaatgcgcgatgacacactactgaaagcggaaggacgagtaaagttgcaattaaaaggaaatgttatgcataaggagcagtagagtattcgttttcatttaaagatattcttgcgctttaattacaaactgcaccgatgttggtggcgtcaaaatcgccgaggcgttccctgaaggccggggcagcccacatggatgtgggctgagggcgcgttttacagggatgttacctcgcgcccgacccggtagccgtaagggataagtcgagggcaccgcgcagcggcgattttgttcgccagagcccgggggtgcagggggcggcggcgattggccgccccctgcgcgctccttgcgccagtggcaatatgttgcttagctcatgaaaggagcgcaacaagatgatgaatcaacatataacaacatcttaaaaaaaggcctgacattacgccaggccttctgcgttaattaatcacgcttttccagcagggtccggtaaatcagaccaccgataatgccgccgacaattggcaccacccagaagaaccacagttgttctaatgcccagccgccctggaagatagcaaccgcggtgctgcgcgccgggttaacagaagtgttagtcaccggaatactaattaagtgaatcagggttaaggccagaccaatagcgatcggcgcaaaacctgccggcgcgaatttgtcggttgcgccgtggatcaccaacaggaaacctgcactcaataccagttcaactaccagcgcggaaagcatggaataaccgcctggactatgctcgccataaccgttagaagcaaaaccgctggctgccgcgtcaaaacccgttttaccactggcaattaaatacagcagcgccgctgcaacaataccgccgacaacctgggcaattacgtagccaacgacttcttttgccggaaaacgtccgccagcccataaaccaatagtgaccgccgggttaaaatgaccaccagaaatatgaccaacagcaaaggccatcgtcagaacggtcagaccgaacgccaacgccacgccggcaaaaccaatgcctaattccgggaagcctgcggccagtacagcactaccacagccaccaaaaacaagccagaaagtaccaaaacattcagctgctaattttctgaacatatccaccacaattaaaaattgaccctgtgaaaaatatggtcgttttatagggtcgtcgtaaaaaagtgacgacggaaataatgcgcggctattttaaaaacgaaggcgagtcattcaccagataaataaatccagtaaatttgatttagggcaacagcgggttgccccatatagtcatttgtctgattgacagtgtagtgcacgcaaaagatttaatcctttaggcgtaataaaaaataatttatcatgctaattatttgattttgttgtttttgcagacttatcagcaagagggagtataacgcgattattcgctcatttttcagacatttgccatgcttaaatgtgatgtcatcacgtattagcaaggcctttcccgttatactgccagcgtaaaggataagtcacatatttctggaggggatatgattcttgagcgcgttgaaattgtgggttttcgcggtatcaaccgtttgagcttgatgctggaacaaaacaacgtcctgattggggagaacgcgtggggtaaatccagcttgctggacgccttaactctgctgctaagcccagaaagtgatctctaccattttgagcgcgacgatttctggttcccgccgggagatatcaacgggcgagaacatcatctgcatattattttgaccttccgcgaaagcctgccaggccgacatcgggttcgccgttatcggccgctggaagcgtgctggacgccatgcaccgatggctatcaccgtattttttatcgtctggaaggggagagtgcggaagacggcagcgtgatgacactgcgcagttttctcgataaagacggacatccgattgatgtcgaggatattaacgatcaggcacgccatctggtgcgtttaatgccggtgctgcgcttgcgtgatgcccgttttatgcgccgtattcgtaacggcacggtgccaaatgtccctaatgtggaagtcaccgcgcgccagctcgatttcctcgcccgtgagttatccagtcatccgcaaaatctctctgatgggcagattcgtcagggactttccgcaatggtacagctgcttgagcattatttctctgagcagggggccggacaggcgcgatatcgtttaatgcggcggcgagccagcaatgagcaacgaagctggcgctatctggatatcatcaaccggatgattgaccgacctggtgggcgcagctatcgggttattttgctcggcctatttgctactttgttgcaggcaaaaggcacattgcgactggataaagacgcccgtccattgttgctgatcgaagatccagaaacccgtttacaccccattatgcttagtgttgcctggcatctgttgaatcttctgccattgcagcgcattgccaccaccaacagcggtgagttgcttagcttaacgccggtagagcatgtttgccgactggtacgtgagtccagccgcgttgccgcctggcgtctggggccgagtggcttgagtaccgaagatagccgacgcatatcctttcacattcgttttaaccgtccgagtagcctgtttgcacgctgctggttgctggtggaaggggaaacggaaacctgggttatcaatgaactggcgcgtcagtgcggacatcattttgatgccgaagggatcaaggtcattgagtttgcccagtccgggctaaagccactggttaaatttgcccgccgaatggggattgaatggcatgtactggtcgatggcgatgaagcagggaagaaatatgccgctacggtacgcagcctgttgaataacgatcgggaagccgaacgagaacatttaacggcgttaccggcgctggatatggaacattttatgtatcgccagggattttccgatgtgttccaccgcatggcgcaaatcccggaaaatgtaccgatgaatctacgcaaaattatcagcaaagcgatccatcgctcttccaaacccgatcttgccattgaagtggcaatggaggcaggacgtcgtggtgtggactccgtaccgacgctgctgaaaaaaatgttcagtcgcgtgctgtggctggcgcgcggtcgcgcggattaaccgcgaaacatcgtggccatttgtggctgaatagcgtcgagcatctcatagcgccgacggtattcagcccgttttttactggcgatttcggcaatctcttttcgtgctatctgtgctggaaggcggtaatggcgttcagcatcacatacgccgccaacgctttcccagaaagcgttgtaatcagcgtggatcttgccttctttatcgcgataacgcaggctgcggtaaatatgcgtttcattgctgacggcaataatctgctctacctgcaaacgttgggcaaacagacaggccgctttcatcacgaggcgtttgggaaatagcccgtggcaggctttcgtcgcattctggatttcctgatgtggaatttcccattttgcgccttgcagtccgccaataaacatcgttcttttcccctgatattcacacagggtaaacgtgatctctgccagaggaataccttcgctgttgcggaacaggattgtgctgtcaccttctttatccatactgatcatcatggtcagctcaagcgtgaactgctcgccgtttttgccttccagcttcgccagttgcagcccgggggtattcaaatataagctgaattcttccgcgctcatacattcgcggagtaacgcataatggtaacgtaacgcctccagcaattgcttacggctaagattcgccgcaaggtaagggcgatgcagacgcacaggcagtcgcggctggcgcgttaacaatacattgagattaggccagtgggaaagttcgttcatccactcaacgcttaaacgcggcataatcaagctgcgcagcaaaaatttctggcgaaaactacggcgatgccagaatttacccggccgacactgtccacgtgccagactaagaaaaagactcaggctgctgagagattcagatggcgtaaaggtccgttcagttagctggctcatattcatgaaatcaatggttatacatggcgtgcttttcaccattgcgtatcttaaccaaacatcaatagtgtgattactaacgtaaattttagggttttgttgatatttcgttgaagttaatgacccggattggcatatggagtattcagaaaatttatgaaaaagcggaaaaccgtgaagaagcgttacgttattgcgctggtgatagtcatcgccggactgattacgttatggagaattcttaacgcacccgtgccgacttatcagacgctgattgtgcgccccggtgatttacagcaaagcgtgctggcgaccggaaagctggacgcgctgcgtaaggttgatgtgggcgcgcaggtcagcggtcagttgaaaactctgagcgtggcgattggcgataaagtaaaaaaagaccagcttttaggggttattgatcctgaacaggctgaaaaccagattaaggaggtcgaagcaacgctgatggagctacgtgcgcagcggcagcaggcggaagcggagctgaaactggcgcgggtgacgtattcccgtcagcaacgtctggcacaaacgaaggctgttagtcagcaggatctcgacaccgccgcgacggagatggctgtgaaacaggcgcaaattggcaccattgacgcgcaaatcaagcgcaatcaggcttctctcgatacggctaaaaccaatctcgattacactcgcatcgttgccccgatggccggggaagtcacgcaaatcaccactctgcaaggccagacggtgattgccgcacaacaagcaccgaacattctgacgctggcagatatgagcgccatgctggtaaaagcgcaggtttctgaagcggatgtaatccacctgaagccggggcaaaaagcctggtttacggtgcttggcgatccactgacgcgctacgaggggcaaatcaaggatgtactaccgacgccggaaaaggttaacgacgctattttctattacgcccgttttgaagtccccaaccccaatggtttgctgcggctggatatgactgcgcaagtgcatattcagctcaccgatgtgaaaaatgtgctgacgatccctctgagcgcgttaggcgatccggttggcgataatcgttataaagtcaaattgttgcgtaatggtgaaacacgcgagcgtgaagtgacgattggcgcacgtaacgataccgatgttgagattgtcaaagggcttgaagcgggcgatgaagtggtgattggtgaggccaaaccaggagctgcacaatgacgcctttgctcgaattaaaggatattcgtcgcagctatcctgccggtgatgagcaggttgaggtgctgaagggcatcagcctcgatatttatgcgggtgagatggtcgcgattgttggcgctagcggttccggtaaaagcaccctgatgaatattctcggctgtctggataaggccaccagcggcacctatcgcgtcgccggtcaggatgttgccacgctggacgccgatgcgctggcgcaactgcgccgcgagcatttcggctttattttccagcgttaccatttgcttagccatttaaccgccgagcagaacgttgaagtacccgccgtctatgctggtcttgagcggaaacagcgactgcttcgtgcccaggagttgctgcaacggctggggctggaagaccgtacagagtattatccggcacagcttagcggtggtcagcaacagcgcgtcagcatcgcgcgggcattgatgaacggtggtcaggtaattcttgccgatgaaccaaccggcgcactggacagccattctggcgaagaggtgatggcgatcctgcatcagctgcgcgatcgtgggcatacggtgattatcgtcacccacgatccgcaggtcgctgctcaggccgagcgggtgatcgaaattcgcgacggcgaaattgtgcgcaatcctcccgccattgaaaaagtgaatgttactggcgggacggaacctgttgtcaacacggtgtctggctggcggcagtttgtcagcggttttaacgaggcgctgacgatggcatggcgggcgctggcagcgaataaaatgcgtactttactgaccatgctggggattattatcggtattgcgagcgtggtttccattgtcgtggtgggtgacgccgccaaacaaatggtgctggcggatattcgttctattggtacgaatactattgatgtctatcccgggaaagattttggcgatgacgatccgcaatatcagcaggcgctgaagtacgacgacttaatcgccatccaaaaacaaccgtgggtcgccagtgccacacctgccgtcagccaaaacctgcgcctgcgttataacaatgttgatgttgctgccagtgccaatggcgtgagcggcgattattttaatgtctatggcatgaccttcagtgaaggaaacacctttaatcaggagcagctgaacggtcgtgcgcaggtcgtggttctcgacagtaatactcgccgccagcttttcccccataaagcagatgtggttggcgaggtgattctggtcggcaatatgcccgccagagtcattggtgtggcggaagaaaaacagagcatgtttggtagcagtaaagtgctgcgtgtctggctaccttacagcacgatgtccgggcgagttatgggccagagctggcttaactccattactgtcagggtgaaagaaggatttgacagcgccgaggcggaacagcaactcacgcgtttacttagtctgcgccacggaaagaaggatttctttacctggaacatggacggcgtcttgaaaactgttgaaaagaccacacgtactttacaactgtttctgacgctggtggcggtgattagcctggtggtgggcggtattggtgtaatgaatattatgctggtgagtgtgaccgagcggacgcgggaaattggcattcgcatggctgtaggtgcgcgagcaagcgatgttttgcaacagttcctgatcgaagccgtactggtttgcctggtcggtggcgcgttgggaataacactgagtctgttaattgctttcaccttgcagcttttcttacccggctgggagattggttttagtccgttggcgctgctgctggcgtttctctgcagcacggtcaccgggattttatttggctggttacccgcacgaaatgcggcacgactggatccagtagatgctctggcacgagagtaatttttgagataaaaatgccagccgatcgggctggcattttgcctttaggatgtacacaatgagacagaagagttatgcgactgccgcttctacttcgacgggcacaataacactggcgtgattgccttttggcccctggtggacatcaaactgaacggattgtccagcttttagcgttctgtaaccatccatctgaatggtggaataatgagcgaaaatatcttcgccgccgccttcagggcagatgaaaccaaaccctttggcattgttgaaccacttaacagtacccttttccatgcttcgacatccttcgcaaatcttatacaagtaagatggaataaaccggggtcagagagggggctgttcaaaacctcgccaactctagaaatacaatttagagaattagggcgagccgtcaagcatttgacaggggacaaggggcaggtatgaatcaaaaatttgaagcagttaacgctattgacaggaatgtgacagatgtcgctgatgccaacgatagatgatagttatctatcatgtggagtagattggtcaggcaaataagctcttgtcagcggcagggcgttctgccgataaccgtaaccgaagatgataactgacaatgggtaaaacgaacgactggctggactttgatcaactggcggaagaaaaagttcgcgacgcgctaaaaccgccatctatgtataaagtgatattagtcaatgatgattacactccgatggagtttgttattgacgtgttacaaaaattcttttcttatgatgtagaacgtgcaacgcaattgatgctcgctgttcactaccaggggaaggccatttgcggagtctttaccgccgaggttgcagaaaccaaagtggcgatggtgaacaagtacgcgagggagaatgagcatccattgctgtgtacgctagaaaaagcctgaatgcaggcataaaaattgggggaggtgcctatgctcaatcaagaactggaactcagtttaaatatggctttcgccagagcgcgcgagcaccgtcatgagtttatgaccgtcgagcacttgttactggcgctgctcagtaacccatctgcccgggaggcgctggaagcgtgttctgtggatttggttgcgctccgtcaggaactggaagcctttattgaacaaaccacacccgttctgcctgccagtgaagaggagcgcgacacacagccgacgctgagttttcagcgtgtactgcaacgtgcggtcttccatgtccagtcctccggtcgcaatgaggttaccggtgcaaacgttctggtcgctatctttagcgaacaggagagccaggcggcatatctgttgcgtaaacatgaagtcagccgtctcgatgtggtgaactttatctctcatggcacgcgtaaagacgagccgacacagtcttctgatcctggcagccagccaaacagcgaagaacaagctggtggggaggaacgtatggagaatttcacgacgaacctgaatcagcttgcgcgcgtgggcggaatcgacccactgattggtcgtgagaaggagctggagcgtgctattcaggttctctgccgtcgccgtaaaaacaacccgctgctggtgggggaatctggtgtcggtaaaaccgcgattgcggaaggtcttgcctggcgaattgttcagggcgatgtgccggaagtgatggctgactgtacgatttactctctcgatatcggttctctgttagcgggcacaaaatatcgcggcgactttgaaaaacgttttaaagcgttgctcaagcagctggagcaggacactaacagcatcctgtttattgatgagatccacaccattatcggtgcgggtgcagcgtctggtggtcaggtcgatgcggctaacctaatcaaaccgttgctctccagcggtaaaattcgtgtaattggtagcacaacctatcaggagttcagcaacattttcgagaaagaccgtgctctggcgcgtcgcttccagaaaattgatattactgaaccgagcatcgaagaaactgttcaaatcatcaatggcctgaaaccgaagtatgaagcgcaccacgacgtgcgttataccgcaaaagcggtgcgtgcggcggtagagctggcggtgaaatacattaacgatcgtcatctgccggataaagccattgatgttatcgacgaagcgggcgctcgcgcacgcctgatgccggtaagcaaacgcaagaaaaccgttaatgtggcggatattgagtccgtggtggcccgtattgcacgcattccagagaagagtgtttctcagagtgatcgtgataccctgaaaaacctcggcgatcgcttgaaaatgctggtcttcggtcaggataaagccattgaggcgctgactgaagccattaagatggcgcgtgcaggtttaggtcacgaacataaaccggttggtagcttcctgtttgccggccctaccggggtcgggaaaacagaggtgacggtacagcttagcaaagctttgggcattgagcttctgcgctttgatatgtccgagtatatggaacgccataccgtcagccgtcttattggtgcgcctccgggatacgttggttttgatcagggcggtttgctgactgatgcggtcatcaagcatccacatgcggtgctgctgctggacgaaatcgagaaagcgcacccggacgtgttcaatattctgttgcaggtgatggataacggtacgctgaccgataacaacggacgcaaagcagacttccgtaacgtggtgctggtgatgaccaccaacgccggggtacgggaaactgagcgcaaatccattggtcttatccaccaggataacagcaccgatgcgatggaagagatcaagaagatctttacaccggaattccgtaaccgtctcgacaacattatctggtttgatcatctgagtaccgacgtgatccatcaggtggtggataaattcatcgtcgagttgcaggttcagctggatcagaaaggtgtttctctggaagtgagccaggaagcgcgtaactggctggccgagaaaggttacgaccgggcaatgggcgctcgtccgatggcgcgtgtcatccaggacaacctgaaaaaaccgctcgccaacgaactgctgtttggtagcctggtggacggcggtcaggtcaccgtcgcgctggataaagagaaaaatgagctgacttacggattccagagtgcacaaaagcacaaggcggaagcagcgcattaatctgattgttaggtaggttggtcaagtccgtaatctcgaaagaggttacggactttttgtttatggggtggaggaggttcagaccctttttttaatgatgatggtaagttgttgataattagtgctgcgggaaggtaaggataaaaaagggtgctgcaggagaatgggatggttttgctttattaacaacgggctaaacgtgtagtatttgagttcactgccgtacaggcagcttagaaattcacaggtaacatactccacccgcccaccatgttcactgccgtacagacagataaaatgcgaaaaaaaagctcgcactttcgtacgagctcttctttaaatatggcggtgagggggggattcgaacccccgatacgttgccgtatacacactttccaggcgtgctccttcagccactcggacacctcaccaaattgttttgctaccaaacctcatgggtggcaacggggcgctactatagggagttggagtaaaacggtcaagaagaattttaatgataattattgtttgctcatactgtaaacaagttgtgcagtatatctacatcgagacaagttacggacttatacttccaaagtacttcatacatatcacaaaataaaaaggccggttaaaccgaccttttactcgttctttctcttcgcccatcaggcggtaaaacaatcagcgactacggaagacaatgcggcctttgctcaggtcgtacggggtcagttcaacagtcactttgtcgcccgtcaggatgcggatgtagtttttgcgcattttaccggagatgtgtgcagtaaccacgtgaccgttttctaactctacgcggaacatggtattaggcaacgtttcaagaacggtaccttgcatttcaatattgtcttctttggccatctaatcctctggggtatcactaccgtaatttgaaccggcaagataatgccgaagttctgtaaataagtaaagatttgcgcgctaaatcgcaacaaacaggttcggcacattactccgaaaacacacggctaagccgcaccaaaagcgcaacgtataagggagcggtgagataaacgatgggcgttacctgacgcgaaaaattccttatcggcagcggggtaatgagcgtaaccaactctgcgaccgcaattataacactctggggagaaatgtgccgaaaacattcattcttgtggactaaacaagcatcgtggtacccagaaattattcggcaatcgtccgaggcgcatttgattgagataattaaggtaatcccggcggggaatttcgcaggcaccaaggcttgctgtgtgatcgttaaggacctggcagtcgataagcttaccgccatgaccgataaattcctcacagaataccagaagcgccgttttagacgcattttccatccggctgaacatggactcgccacaaaatagcgttccctgggccacgccgtacataccgccgacaagctcatcttcacgccagacttcaatggagtgggcatggccgagttcgtgaaggcgatggtaggcttcgatcacgccacgcgtgatccaggttccttcttcgcgatcgctggcacagccttcaatgacctgaccaaaagcgtaattcatcgtgacacgataggggctgcgtttatgaaatcgcttcatactacggctgatatgcagactttctggccatagcaccgcgcggggatcggggctccaccagaggatggggtcgcctggagaaaaccacggaaaaataccacgctggtaagccattaacaggcgcgcagggctaagatcgcccccaagtgccagcaggccgttaggctcacgtaatgcgccttccggggaagggaaggctatactatggcgagaaagctgaaccaggcgcatgaccgcaaaactccacgcaagtcggatcgttcaataatagcttacaaaccctgcttgaactggtaataacgcccctgtctggcaagcagttctgcgtgagtaccttgctcaataatttgcccgttgtccatcactattatttgttggaaacgagagagtccgcgaagtcgatgggtgaccattaacaccgttttctcacgcatcatttctgcaagcaattcaaggatctggctttcggttgtggcatctaagccttcggtaggttcatccagcaacaccagtggcgcatcatgtaacagcgcacgggcgatagccagacggcgcagttcaccaccggagagctggcgtccgccttcacctaaccaactgttgagacctgcatcctcgagcagcttttccaggccaacgcgacgcaagatctcgctcagagcctcatcactactgccagggctggcgagtaaaagattatcacgcagcgtggcgctaaacagatgcactcgctgaggaacaacgctgatggtctgtcgtagagccgcttcattcaggctggctatggggctatcgttaagcaaaatctcgccctgttgcgggtcccatgcgcgggtcagctgttgtaacagtgtacttttgccgcatccggttcgcccgagaatcgctatatgttccccggcgtttacctgaagagaaatccctttaagtgcctgttgagattgctccggataagtgaactgaacatcccgtaacgtcaggctaacgcgatcggcaacacgagtttgggtatcaggaaaggtgacctccggtttttgatccgttaagtcagagatacgtacggcagaggcaatgacttgccccagatgctgaaatgcacccgttactggtgccagtgcttcaaacgcggctaacgcgcagaagacaaacagggcaattaacgcgccgggttgagcattgccgccaacgccgccagacgccatccacagcatcaggatcaccgctaacgcgccaatgagcagcattatcgcttggctcaatgcggtcagttcagattgacggcgttgcgcttccagccattgaatttctgtattctctagttgcgtgcgataacgatcgctggcaccaaaaatggtcagctcagcttgcccttgcagccaggccgtcagttgttggcgatactgtccgcgaagatgagtcagattttgcccggtgctttttcccgcacgataaaacagcggtggcatcaggaaaagcgtcagtaacataatgccgcccagcgtaaaggcgagggtgaaatcaaggaaacttaacccgattgtcaccaccataatcaccacaaaagcgcccaccagcgggctgataacgcgcaggtaaagatgatcgagcgtatcaacatccgccaccacgcgattgagcaattcgccctgacgatagcgcgccagtccggcaggggagaggggcagcaatttgctgaaggtgtaaatgcgcagatgctgcaacacgcggaaagtcgcgtcgtgacttaccagacgttcaaaatagcgcccggcagtacgggtgattgctgcgccacgcacgcccgcagcgggtagcatatagttgaagctgtacagtccggcaacccccgcaaccgcactggcgctgaggaaccagccggaaagtgtcaacagaccgatactggcgagcagcgtcacaattgccagcacaataccaagacttaacatccatttatgacgtttatacagtgccagatagggtagcaaagcgcgcatttaaatctcctcctgacgatgggccagtaatgtggcgaatgggccaccagccacacttaattccgcgtaacgtccttgctcaataatccggccatcctgcataacccaaatgacatcccagtcagcaagatcttctaactggtgggtgaccattaacgttgtctggcgcagagaggcggcattcagcgcctccattacgcgctgttcactgtgagcatcaaggctggcagcgggttcatccaacagtaataggctacagggatttagtaacgcacgggccaccgccacgcgctgcgcctgccccacggaaaggcgggcagcctggtcgccaacaggcgtatcaacgccttgtgggaggagcggtagaaactcgctgacccaggcgttatccagcgctgcttgtaattcttgttcgctggcatcaggtcgcgccagtagtacgttatcccgcaatgttgctgccggtaattgtgggttttgcccaacccaggagagatgtttacgccaactttctggacttaaatcgcgtaattctatcccgttgattcgtaggcttccctgataactgagaaaaccagaaagcgcgttcagcagactgcttttaccactaccgctgcgaccaaccaacaccgcacgttggcctgctggcaaagtaaagttcagcggtccggccagcgttttaccttccgggctcgtgataaacagctcctcggcctcaatggtcaccggatcggtgcttgctaattccgcctcaccacgttgcggatgggcgagcggggtttccataaacgttttcagactgtcagctgcgccaacagcctgggctttagcatgataaaacgtaccgagatcgcgtaatggctggaaaaactctggcgcaaggatcagggccagaaaacccgcagccagcgtcacaccggtatcgtagtgaccaaaatccagctcgccgagataggaaaaaccaaagtagaccgccaccagagcaatactcaggctggtaaaaaattcgagaatgccggaggataaaaacgccagccgtagcacttccattgtccgttggcggaaatcttcgctagcagaacgaatactttcaatttcagcttcaccacgaccaaaaatacgcaatgtttccatgccgcgcaggcgatcgaggaaatgcccacttaagcgagcaagagcgagaaagttacgtcggttagcatcggcagcccccattccaaccagcgccataaacaacggaattaacggtgcagtgcccagcagaatgagcgccgcagcccagttagaggggaagattgccaccacaatcagcaacggcacgctcactgccagcgccatttgcggcagatagcgtgcatagtaatcatgcatatcgtcaatttgctcgagtaccagcgtcgcccagctccccgcaggtttaccctgaatccacgctggccctgcttgttgcagacggtcgagaacctgacggcggatggcaaagcggatatgctgcccggcgtgataacccacccgttcgcgtaaccagaccacccatgcgcgcagtacaaaggtcagaaccagtaacgtaaagggaagcagcagggcttcacggggaatattctccataatcatatgttgcagaattcgcgccatgaaccaggcctgggcaatgatcaatatgccgctcacaaagcccagcagacgagaaatattcagccaacgttgggagatgacgctttgctgttttaaccagcgggttaactctttttgacgagatttattcattgcacgcttagcaggtgagttatcagaattatttgcagagcaatgttacaacggggaaaaaataaaggcgacccatagtcgcatggtgtcgccttctttacttttgttactgatttgtaaaattattttgcgtcagctaaaccatcgaggtagcgttccgcatcaagtgctgccatgcagcctgtaccggcgctagtaatggcctggcgataaatgtgatccatcacgtcgcctgcggcaaagacgccaggaatgctggtctgggtggcattaccatgaataccgctctgtactttgatgtagccgttttccagttccagctgcccttcgaaaatcgcagtattcgggctgtgaccgatagcaacaaacagaccggcaacgtcgagactctcgatgttatcgctgttttgcgtatcgcgcagacgaacgccagtgacacccatttgatcgccggtcacttcttccagcgtacggttggtgtgcagaatgatgttgccgttctccactttatccatcaggcgcttaatgaggattttttccgcgcggaaaccgtcacggcggtgaatcagatgcacttcgctagcgatgttagacagatacagcgcctcttcaaccgcggtattgccgccgccgatgaccgcaactttctggttgcgatagaagaaaccgtcgcaggttgcacaagcagaaaccccacggcctttaaaggcttcttcagagggcaggccgagatagcgtgcagaagctccggtggcaataatcagcgcgtcgcaagtgtattcgccgttatcgccattcagacggaacggacggttttgcagatccaccttgttgatatgatcaaaaatgatctcagtttcaaacttggtggcatgttcgtgcatgcgctccattaataacggaccggtcagatcgtttggatcgccaggccagttttccacttccgtggtggtggtcagttggccgcctttttccatgccggtaatcagcacaggttgcaggttggcgcgcgccgcgtagacagcagcggtgtatcccgccgggccactacccaggataagcagtttactgtgtttggtcgtgcccatgagatccccatagttgttggcagacaatgggcaggattgtagggaatttacagacgtaaaaaaagagtatgacgattttgttaacaatttgtgcaatcggcagcatcgataagcaggtcaaattctcccgtcattatcacctctgctacttaaatttcccgctttataagccgattaaatgatgaataaacgcccctgttaatgaatatctggcatgttgtactaaaaatcgatgttttgctttgacaatcccctggtgttttgcgaaaacattcgaggaagaaaaaaaacagtattcttatatgcgcataaccatgcatgtaaataccatgtttaccgtgctagtgaaatctacgtatggcgtggacagacgccattcgtgatgtcgatagctgccacaaggcaacggtcttctcaccgtagacccaggcattgcgcgccgtgaatcttcatgatttcggtctatcgtgacgggtagcgactctgaacagtgatgtttcagggtcagacaggagtagggaaggaatacagagagacaataataatggtagatagcaagaagcgccctggcaaagatctcgaccgtatcgatcgtaacattcttaatgagttgcaaaaggatgggcgtatttctaacgtcgagctttctaaacgtgtgggactttccccaacgccgtgccttgagcgtgtgcgtcggctggaaagacaagggtttattcagggctatacggcgctgcttaacccccattatctggatgcaagtcttctggtattcgttgagattactctgaatcgtggcgcaccggatgtgtttgaacaattcaataccgctgtacaaaaacttgaagaaattcaggagtgtcatttagtatccggtgatttcgactacctgttgaaaacacgcgtgccggatatgagtgcctaccgtaagttgctgggggaaaccctgctgcgtctgcctggcgtcaatgacacacggacatacgttgttatggaagaagtcaagcagagtaatcgtctggttattaagacgcgctaacacggaacaggtgcaaaatcggcgtattttgattacactcctgttaatccatacagcaacagtactggggtaacctggtactgttgtccgttttagcatcgggcaggaaaagcctgtaacctggagagcctttcttgagccaggaatacattgaagacaaagaagtcacattgacaaagttaagtagcggccgccgccttctggaggcgttgctgatccttattgtcctgtttgccgtctggttgatggctgccttactaagctttaaccctagcgaccccagctggagccaaacggcctggcatgaacctatccataatttaggtgggatgcccggtgcgtggttggcagatacgctgttctttatttttggcgtgatggcttacaccattcccgtcattattgtcggcggttgttggtttgcctggcgtcatcagtccagcgacgaatacattgattattttgccgttagcctacgcatcattggcgttttggcgctcatccttacctcctgtggtctggcggcaatcaacgctgacgatatctggtattttgcctccggtggcgtcattggcagcttactaagcactacgctacaaccactgctacacagtagcgggggaactattgcgctgctctgcgtttgggcagcgggcctgacgttgttcaccggttggagttgggtgaccattgctgaaaaactcggcggctggattttaaacattctcaccttcgccagtaatcgtacccgtcgcgatgatacctgggtcgatgaagatgagtatgaagacgacgaagagtatgaagatgaaaatcacggcaaacagcatgaaagtcgccgtgcccgtattcttcgcggcgcgctagcgcgtcgtaaacggttggcggaaaaattcattaatccgatggggcggcaaacagacgctgcgttgttctccggtaagcggatggatgatgacgaagagattacctacactgcacgcggtgtggctgccgacccggacgacgtcctatttagcggcaatcgtgcaacgcagccagaatatgacgaatacgatccattattaaacggtgcgccaattaccgaacctgtcgctgtagcagctgctgctaccacggcgacacaaagctgggctgcgccggttgaacctgtgactcagacgccgcctgttgcctctgttgatgttccacctgcgcaacctacagtagcctggcagcctgtaccgggtccacaaacgggagagccggttattgctcctgcaccggaaggttacccacagcagagtcaatatgcgcagcctgcagtgcaatataatgagccgctgcaacaaccagtacagccgcagcagccgtattatgcacctgcagctgaacaacctgcgcaacagccgtattatgcccctgcgccagaacaaccggtggcaggtaacgcctggcaagccgaagagcagcaatccacttttgctccacagtctacataccagactgagcaaacttatcagcagccagccgctcaggagccgttgtaccaacagccgcaacccgttgaacagcagcctgttgtggagcctgaacccgttgtagaagagacaaaacccgcgcgtccgccgctttactactttgaagaagttgaagagaagcgagcccgtgaacgtgaacaacttgcggcctggtatcaaccgattccagaaccggttaaagaaccagaaccgatcaaatctagcctgaaagcaccttctgttgcagcagtacctccagtagaagccgctgccgctgtttccccgctggcatctggcgtgaaaaaagcgacactggcgacgggggctgccgcaaccgttgccgcgccagtcttcagtctggcaaatagcggtggaccgcgtcctcaggtcaaagaggggattggtccgcagttgccacgaccgaaacgtatccgcgtgccaactcgtcgtgaactggcgtcttacggtattaagctgcccagtcagcgtgcggcggaagaaaaagcccgtgaagcccagcgcaatcagtacgattctggcgatcagtacaacgatgatgaaatcgatgcgatgcagcaggatgaactggcacgtcagttcgcccagacacagcagcaacgctatggcgaacagtatcaacatgatgtgcccgtaaacgcagaagatgcagatgctgcggcagaggctgaactggctcgtcagtttgcgcaaactcaacaacaacgttattccggcgaacaaccggctggggcgaatccgttcagcctggatgattttgaatttagcccaatgaaagcgttgctggatgatggtccacacgaaccgttgtttacgccaattgttgaacctgtacagcagccgcaacaaccggttgcaccgcagcagcaatatcagcagccgcaacaaccagttccgccgcagccgcagtatcagcagccacaacagccggttgcgccgcagccacaatatcagcagccgcaacaaccggttgcgccacagcagcaatatcagcagccgcaacaaccggttgcgccgcagcagcagtatcagcagccacaacagccagttgcgccacaaccgcaggataccctgcttcatccgctgttgatgcgtaatggcgacagccgtccgttgcataaaccgacgacgccgctgccttctctggatttgctgacaccgccgccgagcgaagtggagccggtagatacctttgcgcttgaacaaatggctcgcctggtggaagcgcgtctggctgatttccgtattaaagccgatgtcgtcaattactctccggggccggttatcactcgctttgaattgaacctggcaccgggcgtaaaagcggcgcgcatttctaacttgagtcgggaccttgcccgtagtcttagcacggtggcggtgcgtgtcgttgaagttattcctggcaaaccctatgtaggtctggagttaccgaataaaaaacgacaaaccgtttatctgcgcgaagttttggataacgccaaattccgcgataatccgagcccattaaccgtggtgctgggtaaagatatcgccggtgagccggtggttgccgatctggcgaaaatgccgcacttgttggttgcggggactaccggttccggtaaatctgtcggtgtgaacgcgatgatcctgagcatgctttataaagcacagccagaagatgtgcgtttcatcatgatcgacccgaaaatgctggagcttagcgtttatgaaggcattccgcatctgttaacggaagtcgttactgatatgaaagatgccgccaacgcgctgcgctggtgtgttaacgagatggagcgtcggtataaactgatgtctgcgctgggtgtgcgtaatctggcgggttataacgaaaaaattgctgaagccgatcgcatgatgcgtccgattccagacccgtactggaagccgggtgacagtatggatgcccagcatccggtgctgaaaaaagaaccatacattgtggtgttggttgacgaatttgccgacctgatgatgacggtaggtaaaaaagtggaagagctgatagcacgtctggcgcaaaaagcccgtgccgcgggtatccacctcgtactggcaactcagcgtccaagcgttgatgttattactggtctgattaaagcgaatattccgacccgtatcgcctttaccgtatccagtaagattgacagtcgtaccattcttgatcaggctggcgcggaaagtctgctgggtatgggggatatgctctactctgggccgaactccacgttgccggtacgtgtccatggtgcttttgttcgcgatcaggaagttcatgccgtggtgcaggactggaaagcgcgtggtcgcccacagtatgttgatggcatcacctccgacagcgaaagcgaaggtggtgcgggtggtttcgatggcgctgaagaactggatccgttgttcgatcaggcggtgcagtttgtcactgaaaaacgcaaagcgagtatttctggcgtacagcgtcagttccgcattggttataaccgtgcagcgcgtattatcgaacagatggaagcgcaggggattgtcagcgaacaggggcacaacggtaatcgtgaagtgctggccccaccgccgtttgactaactaatgcatcgtatgccggataaggcgcggtagcgtcgcatccggcactctatcaactgaaaattcagtattttcttctttcctcaagctgattattagcctggaatagagagtagagggaactcccgatcgggagtgacgtaatttgaggaataatgatgaaaaaaattgccatcacctgtgcattactcagtagcttagtagcaagcagcgtttgggctgatgccgcaagcgatctgaaaagccgcctggataaagtcagcagcttccacgccagcttcacacaaaaagtgactgacggtagcggcgcggcggtgcaggaaggtcagggcgatctgtgggtgaaacgtccaaacttattcaactggcatatgacacaacctgatgaaagcattctggtttctgacggtaaaacactgtggttctataacccgttcgttgagcaagctacggcaacctggctgaaagatgccaccggtaatacgccgtttatgctgattgcccgcaaccagtccagcgactggcagcagtacaatatcaaacagaatggcgatgactttgtcctgacgccgaaagccagcaatggcaatctgaagcagttcaccattaacgtgggacgtgatggcacaatccatcagtttagcgcggtggagcaggacgatcagcgcagcagttatcaactgaaatcccagcaaaatggggctgtggatgcagcgaaatttaccttcaccccgccgcaaggcgtcacggtagatgatcaacgtaagtaaaggcacctgagtgagcaatctgagcctcgattttagcgataatacttttcaacctctggccgcgcgtatgcggccagaaaatttagcacagtatatcggccagcaacatttgctggctgcggggaagccgttgccgcgcgctatcgaagccgggcatttacattctatgatcctctgggggccgccgggtaccggcaaaacaactctcgctgaagtgattgcccgctatgcgaacgctgatgtggaacgtatttctgccgtcacctctggcgtgaaagagattcgcgaggcgatcgagcgcgcccggcaaaaccgcaatgcaggtcgccgcactattctttttgttgacgaagttcaccgtttcaacaaaagccagcaggatgcatttctgccacatattgaagacggcaccatcacttttattggcgcaaccactgaaaacccgagctttgagcttaatagcgcactgctttcccgtgcccgtgtctatctgttgaaatccctgagtacagaggatattgagcaagtactaactcaggcgatggaagacaaaacccgtggctatggtggtcaggatattgttctgccagatgaaacacgacgcgccattgctgaactggtgaatggcgacgcgcgccgggcgttaaatacgctggaaatgatggcggatatggccgaagtcgatgatagcggtaagcgggtcctgaagcctgaattactgaccgaaatcgccggtgaacgtagcgcccgctttgataacaaaggcgatcgcttttacgatctgatttccgcactgcataagagcgtacgtggtagcgcacccgatgcggcgctgtactggtatgcgcgaattattaccgctggtggcgatccgttatatgtcgcgcgtcgctgtctggcgattgcgtctgaagacgtcggtaatgccgatccacgggcgatgcaggtggcaattgcggcctgggattgctttactcgcgttggcccggcggaaggtgaacgcgccattgctcaggcgattgtttacctggcctgcgcgccaaaaagcaacgctgtctacactgcgtttaaagccgcgctggccgatgctcgcgaacgcccggattatgacgtgccggttcatttgcgtaatgcgccgacgaaattaatgaaggaaatgggctacgggcaggaatatcgttacgctcatgatgaagcaaacgcttatgctgccggtgaggtttacttcccgccggaaatagcacaaacacgctattatttcccgacaaacaggggccttgaaggcaagattggcgaaaagctcgcctggctggctgaacaggatcaaaatagccccataaaacgctaccgttaatgttatcgttgcggtaatgttgttactgtatccctgtggtcgcaggctgtggccacatctcccatttaattcgataagcacaggataagcatgctcgatcccaatctgctgcgtaatgagccagacgcagtcgctgaaaaactggcacgccggggctttaagctggatgtagataagctgggcgctcttgaagagcgtcgtaaagtattgcaggtcaaaacggaaaacctgcaagcggagcgtaactcccgaagcaaatccattggccaggcgaaagcgcgcggggaagatatcgagcctttacgtctggaagtgaacaaactgggcgaagagctggatgcagcaaaagccgagctggatgctttacaggctgaaattcgcgatatcgcgctgaccatccctaacctgcctgcagatgaagtgccggtaggtaaagacgaaaatgacaacgttgaagtcagccgctggggtaccccgcgtgagtttgactttgaagttcgtgaccacgtgacgctgggtgaaatgcactctggcctcgactttgcagctgcagttaagctgactggttcccgctttgtggtaatgaaagggcagattgctcgcatgcaccgcgcactgagccagtttatgctggatctgcataccgaacagcatggctacagtgagaactatgttccgtacctggttaaccaggacacgctgtacggtacgggtcaactgccgaaatttgctggcgatctgttccatactcgtccgctggaagaagaagcagacaccagtaactatgcgctgatcccaacggcagaagttccgctgactaacctggtgcgcggtgaaatcatcgatgaagatgatctgccaattaagatgaccgcccacaccccatgcttccgttctgaagccggtagttatggtcgtgacacccgtggtctgatccgtatgcaccagttcgacaaagttgaaatggtgcagatcgtgcgcccagaagacagtatggcggcgctggaagagatgactggtcatgcagaaaaagtcctgcagttgctgggcctgccgtaccgtaaaatcatcctttgcactggcgacatgggctttggcgcttgcaaaacttacgacctggaagtatggatcccggcacagaacacctaccgtgagatctcttcctgctccaacgtttgggatttccaggcacgtcgtatgcaggcacgttgccgcagcaagagcgacaagaaaacccgtctggttcataccctgaacggttctggtctggctgttggtcgtacgctggttgcagtaatggaaaactatcagcaggctgatggtcgtattgaagtaccagaagttctgcgtccgtatatgaacggactggaatatattggctaatacccaatttttctgaatctaaaaagcgcctgcgggcgctttttttgtctccctttgataccgaacaataattactcctcacttacacgtaatactactttcgagtgaaaatctacctatctctttgattttcaaattattcgatgtatacaagcctatatagcgaactgctatagaaataattacacaatacggtttgttactggaatcaatcgtgagcaagcttgagtgagccattatgaaaacgaaaatccctgatgcggtattggctgctgaggtgagtcgccgtggtttggtaaaaacgacagcgatcggcggcctggcaatggccagcagcgcattaacattaccttttagtcggattgcgcacgctgtcgatagcgccattccaacaaaaagtgacgaaaaggttatctggagcgcctgtacagttaactgtggtagtcgctgcccgctacgtatgcacgtcgtggacggtgaaatcaaatatgtcgaaacggacaataccggcgatgacaattacgacggcctgcaccaggttcgcgcctgcctgcgtgggcgttccatgcgtcgccgtgtctacaatccggaccgcctgaaatatccgatgaaacgagtcggggcgcgcggtgaaggcaaattcgagcgcattagctgggaagaagcctacgacatcatcgcgaccaatatgcagcgcctgatcaaagagtacggcaacgagtctatctatctgaactatggcaccggtacgctgggcggcaccatgacccgctcctggccgccgggaaataccctggtcgcgcggctgatgaactgctgcggcggctatctgaaccattacggcgactactcctccgcgcaaattgcggaaggtttgaactatacctacggcggctgggcagatggcaacagcccgagcgatatcgaaaacagtaagctggtagtgctgtttggtaataaccctggcgaaacgcgaatgagtggcggtggggtgacttactatcttgaacaggcacgccagaaatctaatgcccgcatgatcatcatcgatccgcgctataccgacaccggtgccgggcgcgaagatgagtggatccctattcgtccgggaacagatgccgcactggttaacggtctggcgtacgtcatgatcactgaaaacctggtggatcaggcattcctcgataaatattgcgttggctacgatgagaaaaccctgccagccagtgcgccgaaaaatggccactataaagcttatattctgggtgaagggccagatggcgtggctaaaacgccggaatgggccagccaaatcactggtgttccggcagacaaaatcatcaaattggctcgtgaaatcggtagtaccaaaccggcgtttatcagccagggatggggcccgcagcgtcacgctaacggtgaaatcgcaacccgtgctatcagcatgctggcgattctgaccggtaacgttggtattaacggaggcaacagcggcgcgcgtgaaggtagttacagcttaccgtttgtccgtatgccgaccttggaaaacccgatccagaccagcattagcatgtttatgtggaccgatgccattgaacgtggcccggaaatgacggcgctgcgtgatggtgtacgcgggaaagataagctggatgtgccgatcaaaatgatctggaactatgccggtaactgcctgattaaccagcattctgaaatcaaccgtacccatgaaatccttcaggatgataagaagtgcgagctgattgtggttatcgactgccacatgaccagtagcgcgaaatatgctgacatcctgctgcctgactgcaccgcttccgaacagatggactttgcgctggatgcatcctgcgggaatatgtcttacgtgattttcaacgatcaggtgattaaaccgcgctttgaatgtaagaccatctatgaaatgaccagcgaactggcaaaacgtcttggcgttgagcaacagtttactgaaggccgtacccaggaagagtggatgcggcatctgtatgcccagagccgggaagcgattcctgaactgccaacgtttgaagagttccgcaagcaggggatctttaaaaagcgcgacccacaagggcatcacgttgcttataaagccttccgtgaagatccgcaggcaaacccactgactacgccaagcggcaaaattgagatttatagccaggcgctggctgacattgccgctacctgggaattgcctgaaggcgatgtgatcgatccactgccgatctacacgccgggctttgaaagttatcaggatccgctgaacaaacagtatccgctgcagcttacaggtttccactataaatctcgcgttcacagtacttacggcaacgttgatgtgctgaaagcggcttgccgtcaggaaatgtggatcaacccgcttgatgcccaaaaacgcggtatccacaacggcgataaagtcaggatctttaacgatcgtggtgaggttcatattgaggcgaaagtgacgccacgaatgatgccgggtgtggtcgcactgggtgaaggtgcctggtatgacccggatgcaaaacgtgtcgataagggtggttgtattaacgtactgaccactcaacgtccgtctcctctcgctaaggggaatccgagtcatacaaaccttgttcaggttgaaaaggtgtaaggagtaaccgatgacaacccagtatggattttttattgattccagccgttgcaccggttgcaaaacctgcgagctggcctgtaaagactacaaagatttgacgccagaagtcagcttccgccgcatttatgaatatgctggcggcgactggcaggaagataacggtgtctggcaccagaacgtgtttgcctactatctgagcattagttgtaaccactgcgaagatccggcttgtactaaagtctgcccgagcggtgcgatgcataaacgtgaagatggttttgttgtggtcgatgaagatgtgtgcattggctgccgctactgccatatggcttgcccgtatggcgcaccgcaatataacgaaacgaaaggccatatgaccaaatgcgatggttgttatgaccgtgttgcggagggtaaaaagccgatctgtgttgaatcttgtccgctgcgggcgctggatttcggccctatcgacgagctgcgtaaaaaacatggcgatctggcggccgttgcgccgttgccgcgagctcactttaccaaaccgaatattgtgatcaaacccaatgccaatagccgcccgaccggggataccactggctatctggcaaacccgaaggaggtgtgagatgggaagtggatggcatgaatggccgctgatgatcttcacggtcttcgggcaatgtgtagcaggtggttttatcgttctggctttggcgctgctcaaaggcgacctgcgagcagaagcccagcagcgtgttatcgcctgcatgtttggtttatgggtgctgatgggcattggctttatcgcctctatgctccatcttggtagtccaatgcgcgcttttaacagcctcaaccgggtaggggctagtgcactcagtaacgaaatcgccagcggtagcatcttttttgccgtaggcggcatcggctggttgctggcaatgctgaaaaagctgagtccggcattgcgtacgctgtggctgatagtgacgatggttcttggcgtcatctttgtctggatgatggtgcgtgtgtataacagcattgataccgttccgacctggtacagcatctggacgccgatgggcttcttcctgacgatgtttatgggcggcccgttactgggttacctgttgttgagtctggctggcgtcgatggctgggcgatgcgtctgctgccagcaatttctgtactggcactggtagtgagtggcgtggtgagtgtgatgcagggcgcagagctggcgactattcatagttctgtgcagcaggccgcagcgctggtgccggactatggtgcgctgatgtcctggcggatcgtgcttttggccgttgccctgtgcttgtggattgcaccacagctaaaaggttatcagcctgcggttccgctactttctgtaagtttcattctgcttctggcaggggaattaatcggtcgcggcgtattctatggtttgcatatgaccgtggggatggccgtcgcaagctaatcataacaaccggggtttcggccccggttctcttttatttctgcttcgttaacgtgtcataactggtcatcaaattacgataatcaggaatgtggttagagaacaacgtcgccagtccttcaatatcattacgccagtcgcgatgcagctcgcacgccacgccgaaccatgtcatcaattgcgcaccagcttggctcaagcgatcccatgcgctatgccgggtaatttcattaaaggtcccactcgcgtcagtcacgacaaagacgtcaaacccttcttcaatggcactaagcgccgggaatgccacgcaaacttcggttaccacaccggcaataattaactgttttttacctgtcgctttgacagcttttacaaaatcttcgttatcccaggcgttaatatttcccgggcgagcaatgtaaggtgtatcggggaattgtgctttcagttctggaactaatgggccgttaggaccggtttcaaaactggtggtaagaatagttggtaagttgaaatacttagccaggtcacccagcgccagcacgttatttttaaacttatcgggttcgatatcccgtacaagggaaagtaaaccagcctggtgatcaacaagcaaaacggcagcatcatttttatcaagacgaacatacggtttggtcatcctcttctcctttcgagagtcagtggtacgtctgaaatcgatcagacgcgatgcattgctctgaaagcatagacgggaaatatgagtttgctgtgaccatgaaatttttcgactgaacgaagcgtatgaaatttgtgttagttcaataaaaacaatcagatgagactaatcatctcttcagcattagcgttatgaatgagtaatataaatcgataataccgccgctgggatatcgcgtattttcacccattgacaatgtttttggcggtggcatgatgcgcatgaaatttgaacttcctcacggttttaattcatgtccacgtatacccagcctgtcatgcttttgctgtctggcctgcttttgttgactctggcgattgcggtgttaaatacactcgtgccgctttggctcgcccaggaacacatgtccacatggcaggtaggcgttgtcagcagttcctattttaccggcaaccttgtcggtacattgctgacagggtatgtcattaagcgcattggctttaaccgcagctattatctggcctccttcatttttgccgctggctgtgccggccttggcctgatgattggattctggagctggttggcttggcgttttgtcgcgggcgtcggctgtgccatgatttgggtggttgttgagagcgcgctgatgtgcagtgggacgagtcgtaaccgtgggcgtttgcttgctgcgtatatgatggtttattacgtgggaacgtttttaggccagttactggtcagcaaagttagtaccgagctgatgtccgtattgccgtgggttacaggtttgacgttggcagggatcttaccgctgttgtttacgcgtgtgctgaatcagcaggctgaaaaccatgatagcacgagtattacgagtatgctaaaactccgtcaggcgcggcttggcgtgaatggctgcattatcagtggaatcgttctgggatctctatatggcctgatgccgctgtacctcaatcacaaaggggtgagcaatgccagcattggtttctggatggcggtactggtcagtgcgggtatccttggacaatggccgattggacgtctggcggataagtttggtcgactgctggtgttgcgtgttcaggtctttgtcgtcattctcggcagtatcgcgatgcttagccaggcggcgatggccccagcgttattcatcctcggtgccgctggctttacgctatatccggtggcgatggcatgggcttgcgagaaagttgaacatcatcaactggtggcgatgaaccaggccttactgttgagctatactgtgggaagcctgcttggcccgagttttaccgctatgctaatgcagaatttctccgataatttattgtttatcatgatcgccagcgtaagctttatctatttgctgatgctgctgcgcaacgccggtcatacgccgaaacccgttgctcacgtgtaaatgaattcaagcagagtgtgaacttactgtttcacactctgcttttttgtttcttctatctgacttgctttattccaaattttattcgtttaaaaataaaatgtgcagcaggttataattttgcatttcgctatttccgcacttcttatttgccgcgcataatccctcgttttaccgatgcccctttaattttggcgaaggatttgtctatggctgggaatgttcaggaaaaacagttgcgatggtacaacattgcgctgatgtcttttatcactgtctggggttttggcaacgttgttaataactatgccaaccaggggctggtggttgtttttagttgggtgtttatctttgcactctatttcacaccttatgcgctaattgttggtcagttaggcagcaccttcaaagatgggaagggcggggtcagtacctggattaaacacacgatgggacccggactggcttatctcgccgcgtggacctactgggtggtgcatattccctatctggcacaaaaaccccaggcaattctgattgcgctcggttgggcgatgaaaggcgacggtagcctaatcaaagaatatagtgtcgtagcgttacaggggttaacgctggtgctgtttatcttctttatgtgggttgctagtcgcggtatgaaaagcctgaaaatcgtcggttctgtggcagggattgctatgtttgttatgagtctcctgtatgtggcgatggcggtaaccgcgcctgcaattactgaagtgcatattgcgaccacaaacattacctgggaaacgttcattcctcatatcgactttacctacattaccactattagtatgctggttttcgcggttggcggagcagagaagatttctccttacgttaatcaaacgcgcaacccaggaaaagaatttccaaaagggatgttatgcctggcggtgatggttgcggtttgtgccattctgggcagcctggcgatggggatgatgtttgatagccgtaatatcccggatgacttaatgaccaacggtcagtattacgcctttcagaagctgggcgagtattacaacatgggtaatactttaatggtgatttacgccattgcgaataccctgggacaagtagcggcgctggtattcagcattgatgccccgcttaaagtgctattaggtgatgctgacagcaaatatattccagccagtttatgtcgtaccaacgcttctggtacgcccgttaatggctattttctgaccctggtactggtggcgattctgattatgctgccgactctcggcattggtgatatgaacaatctctataaatggctgttgaaccttaatagcgtagtgatgccgctgcgttatttatgggtatttgttgcatttattgcagtcgttcgcttggcgcagaaatataaaccagaatatgtctttattcgtaataagcctctggcaatgaccgtcgggatttggtgttttgcctttaccgcctttgcctgtttgacggggatcttcccgaaaatggaagccttcactgcagagtggaccttccagttggcgctgaatgttgcaacgccgtttgtgctggtaggattaggactgatattcccgctgctggcgcgtaaagcgaatagtaaataattattgtggtcggtgacgctgactctggcagatctgacccgtttttacataatcgagaaatgcgcgcaagccgcaggacatatactggcggtttggataatagatctggaagcctggacgctctgtgctccagtcttccagtacacattctaaacgaccagtatcaaggtactccttgatctgttcatagagcagatacccgataccagcacccatcaaaacggcctccagttcagcatcaacatcatccagaatgatatttcctgcgacagcaatttccagctcctttgcaaattgccagtggaaaggtttgccgctgggataacgaaaaacaacacattgatgattaagcagatcatgaggatggcggggtttgccatatcttgcaaagtactctggcgttgctgctacacataatttcactggcgggccgatcgccacgctgatcatatctttttcgacgatgcaactaagtcgaacgccagcgtcaaagccctgttggacgatatcgacaagagagtcgtcagttgtgagctcgactttaatatcaggatattcacgtgtgaaaccaaccagtaaagacattaaaaatatacgtgcagctacccgggcggcattgattttgagcgttcctgtcggtgtcagacgaaaatcattcatctcatctaacatgatctgaatttcgtcgaaagctgggcgcaatcgttcatagagattagaacccgcttccgttaagcttacgcttcgggttgtccgattgaataagcgaattttaagacgttgttccagtgttttaatactatggctaatggcggagctggataagcctaactcatcgcccgctgcacgaaagctttgattacgggccacggcaaagaaagtggcaaagtcagacatattcatccgcattagtgaaaatccttcattaactcatcctgaatcatcacgtttacaggattatgccgcctgcgtaaagtgcgctccagaacttaacgtggaggtaaaattatgcagtctgaacgtatttatttggtatgggcccatcctcgtcatgatagtttgaccgcacatattgctgatgcgatccatcagcgggcaatggagcggaaaatacaggtgacggaactcgatttatatcggcgtaatttcaacccagtgatgacgccggaagatgaaccagactggaagaatatggataaacgttattctccagaggttcatcagctttatagtgagctgcttgaacatgacacgttagtggtggtttttcctctctggtggtacagcttcccggcaatgctaaaaggatatattgacagagtatggaataatgggctggcttatggagatgggcacaaattaccattcaataaagttcgttgggtggcgctggttggaggagacaaagaaagttttgtccagatgggctgggaaaaaaatataagcgattatttaaaaaatatgtgcagttatcttggtattgaagatgccgatgtcactttcttgtgtaatacagtggtattcgatggggaagaacttcacgcgagctattatcagagcttattatctcaggtacgggatatggtagatgcactataagatgtgttaaaaacgctgtagcagaatgaagcgcggaataaaaaagcggcaactcaataaagttgccgctttacggggaaattagaacattaccttatgaccgtactgctcaagaatgcctttcacgcgttccatggtctctttcttcggtggtttaacaccgtcgagtttgtactcttcacccattgccacccatttgtgtttgcccagctcgtggtaggggagaagctcgattttctcaacgttgcccatatcacgggtaaattcaccgaggcgatgcgcactatcgtcatcgtcagaccagcctgggacaacaacgtagcggatccacaccttcacatttttgttcgccagatatttagcgaactccagcgtgcggtggttggaaactccaaccagattttggtggatctcgtcgttcatctgtttgagatcgagcattaccaggtcggttacttccagcagttcatcaatcaccggatcgtaacgacgaacaaaaccgttggtgtccagacaggtatgaatgccttcttttttgcaggcgcggaaccagtcacgaacaaactcagcttgcaggattgcttcaccgccggatgcggtaacgccgccgccggaagcgttcataaagtggcgataggtcaccacttccttcatcaaatcttcaacggtaacttctttaccgccatgcgtgtcccaggtgtcgcggttatgacaatacaggcagcgcatcaggcagccctggaaaaaggtgataaagcgaatacctgggccgtctacggttccacaggattcaaaggagtgaatgcgaccaataacactcattgcggtgtttctccagatgtggcccatctgaggccgtgttggtgcgcagctcgaaggctacgtcgagtctgttttggcagtcaccttaaagtatagatagctgacaaaaaaggctctcgcgctaaaaaaggccccactttcgtggagcctttattgtacgctttttactgtacgatttcagtcaaatctaattacatagattgagtgaaggtacgagtaataacgtcctgctgctgttctttagtcaggctgttgaaacgtactgcgtagccagatacacggatggtcagctgcggatatttttccgggttttccatcgcgtcgagcagcatttcacggttcatcacgttaacgttcaggtgctgaccaccttcgatggatgcttcgtggtggaagtaaccatccatcagaccagccaggttggtcttacgaacttcgtcgtctttacccagtgcgttcggaacgatagagaaggtgtaggagataccatctttagcgtaagcaaacggcagtttagcaacggaagtcagagaggctactgcacctttctggtcacgaccgtgcatcgggttagcacccggtccgaacggcgcgccagcacgacgaccgtctggggtgttacccgttttcttaccatacacaacgttagaagtgatggtcagaacagactgagtcgggatagcgtcacggtaggtgtgcagtttctgaattttcttcatgaaacgttctaccaggtcaacagccaggtcatctacacgcggatcattgttaccaaactgcgggtattcgccttcgatttcgaagtcgatagccagaccgtcttcgtcacgaatcggtttaactttcgcatatttgattgcagacagggagtcagcagcaacggacagaccagcgataccacacgccatggtgcggataacgtcacggtcgtgcagcgccatcagagaggcttcgtagctgtacttgtcgtgcatgtagtggatgatgttcagtgcagtgatgtactgtttagccagccagtccatgaagtgatccatgcgctccatcacttcatcatagttcaggacatcgcctttgatcggttcagacttcggaccaacctgcattttcagtttttcgtcaacgccgccgttgattgcgtacagcatggttttcgccaggtttgcacgcgcaccgaagaactgcatttgtttaccaacgatcatcgggcttacgcagcaagcaatagcgtagtcatcgttgttgaagtccggacgcatcaggtcatcgttctcatactgcagagaagaggtgtcgatggacactttagcggcgaatttcttgaagttcagcggcagtttttcagaccacagaatggtcatgttcggttccggagacggacccatggtgtacagggtgttcaggaaacggaagctgtttttggtaaccagggtacgaccgtcgaggcccataccaccgatagattcggttgcccagatcgggtcgccagagaacagttcatcgtattccggagtacgcaggaagcgaaccatacgcagtttcatgaccaggtggtcaaccatttcctgcgcttcttgttcggtgatcttgccagctttcaggtcacgttcgatgtacacatccaggaaggtggaggtacgaccgaaggacattgcagcaccgttctgagacttaacagcagccaggtagccgaagtaagtccactggatagcttcctgagcgttggtagccggaccagagatgtcgtagccgtatttcgcagccatttctttcatctgacccagagcgcggtgctgttcagcgatttcttcgcgcagacggatagtctgttccaggtttacgccgttttccagatcagcctgcagagaagtgaactgtgccagtttgtctttcatcaggtagtcgataccgtacagcgcaacgcgacggtagtcaccgatgatacggccacggccatatgcatctggcagaccggtcagaacaccagatttacggcaacgcaggatgtccggagtgtaaacgtcgaacacgccctggttgtgagttttacggtattcagtgaagatttttttgatcatcggatccagttcgcggttgtacgctttgcaggaaccttcgatcattttgataccaccgaacgggataagagcacgtttcagcggagcttcagtctgcagaccaacgattttctcaagctgcttgttgatgtagccagcgtcgtgagaggtgatggtggaagcaacagcggtgtcaaagtcaactggcgcgtgagtgcggttttccagtttaacgccttccattactttgtcccacagggtggtggtcgcttcagtagcgccagccaggaaggactcgtcaccctcgtacggagtgtagtttttctgaatgaagtcacggacgtttacttcattctgccagtcacctttggtaaaaccttcccaggctgtggctaacttttcattaagctcggacatgtaacacctaccttcttaagtggattttttatttactgcgtacttcgacaaccattaatggtggtcgttttcacgcaggtaaatgacccagtatgtcaacccaaccaacaaaccaccaccgataatgttgccgatcgtaaccggaatcaggttatcagtgatgaaattcatcacggtcaggtgagaaaaattttccggtgcagaaccgactgcggtccaaaattccggggatgcgaagtcgcggattacaatacccatcgggatcataaacatgtttgcgatactgtgctcaaaaccgctggcaacaaacatcgcgaccggcagcaccataatgaacgctttgtccatcaggctgcggccagaataactcatccatactgccagacataccatcaggtttgccaggataccaagacagacggcctcaataaaagtatggtgcactttgtggtcggcggtttgtaggacgtttagtccccattgaccatttgcggtcatatactcgccggaaagccacattaaaagtacaaacagcagtgcgccgaccaggttgccaaaatagacatttagccagtttttcgccaactgaccccaggtgatgcgcccactcgccttagcaacaacaatcaacacggtggaagtaaagagatcggctccgcagacaacacaaagaatcagccccagagagaagcaaatgccgccaaccagttttgccatgccgaagggcattgtgcctgtgccagtggttgctgtgatatagaagacgaatgcgatactgatgaaaacaccggcggtaatcgccagatagaaagtcttaagcggatgtttcgttgctttatagacacccgcctcttcggccactttggccattgcagcaggaagtaaaagatcaaaagggttgtcagctttcacactaactctctctttattaagtcggcgacgagatactaacaaagcattatagatgagaaattgatatagatcatatctcgcctggcttataggcccgtaactcgcatggtttttatgcaaatacggagtaaatatttgattatccaaataaaaataaattttaaaaattaacaaatgagttgaattttttccgcatcctccgctaaaacagttaattaaaagggagcatcaggcgaataaagtaacaatatcgatcgtatttattaaatacaaattaccgatatttaaccttataattacaattattttattaatgcaaatatatgtaaagcggggcattaaaaaaacgccccgtaatataactcagactaatcattaagcctacattgcgtaggctatttgattttattttgcccagaatgctgctttggcgcgctgcagcttttcgtaggccttcaacaagctctgatgtgcagcaaacgcgtgcagatcgctatctaccggttgcaggccgtaaaacgccgcttcgccgctcattgccgcactggcggcttctacggcatctgcgccgtacatgcgaacaaacgcattcagatattgcagcggctggcgatcttcttcctgtgccagtaataacaacgtttgcaggcagcgataatagttggcgcgttccggactaaatacactactgttaaactccatcgtccattcggtccagaccagagcctgttccagatcgccaccagccagcgccagcatggcttttaattcaccgatacgcagggtgtaccaaccgttatcgctcccggtcgccagacccaacagctcacgcacgcgggtaaagtcatcaaaaccttcttcatccagttgctcgatgaggttcaggtaatcttctttttcccactcgctgcctggtaggctaagaatcgtttcacgtaaatggctgcccatactgttattcgcgagccacagatcttcagccggataaatatcggacatgccaggcacgataatacggcaagcataaacgcccagatgctcgtaatcggcaatataaacttctttatcttctttgttgaagatagccatcagtgtggcgaactcttcttccgtggtgccggagaaattccagtccacaaacggataatcggcatcctgcttgaacaggtcccaggagattaaaccgctggaatcgataaagtgcgtttcgaggttggtatgttcagcgacttcttcatcatcgaaggttggcggagtaaacacatccaaatctttcaggccacgaccttgcagcagctcggtcacggtacgttccagtgctacgccaaaatcaggatgcgcaccgaaagaggcaaagcaggtaccgttagcaggattgaacagtaccacgcaaatcaccggatactggccgccaaggctaccgtcataagcgaagattgggaaaccctccgcttccagcgtttcgatggcttcaactactgctgggtaacgcgccagcacgtctgccgggatctctggcaggctgatgctttcagcaataatgcggtttttcacgtagcgttcgaaaacttcagacaatccctgaacgcgtgcttcgttgcgggtattacctgcggacataccgttggagacgtacaggttaccaatgatattcatcggaatataaacggtctgattgtcggactgacgcgtaaacggcaggccgcaaataccacgatcttcgttaccggattgtaggtcaatcagcatgctgccggtcagttcattctccggatcataaaacgcgcgcagacggtcatcgagcagcccttctggcacatcgtcattttcggtcagtgggaaccatttttcgttgggataatgcacgaacggaccgttggcgatggtttcgcccagccagaagtccgcaaaaaagtagttggtactgagacgctcgaaatattcaccgagtgcagaagccagcgccgctttcttggttgcgcctttaccgttggtaaaacacagtgcgcactctttgtcgcgaatatgtacagaccagacgttaggcacgggattcagccaggaggcctcttcaatctgaaagccgaggtcactaagtttttgctggaagcgagcgatggaatcttccagagcggcatctttgccggggataaatgtttgcgtcatgaaaatcactttagtcgtacggaaagcgcgcaataatacgggttttatctcaaaggcgctatcaccgccgccatgccgatgaactgttgactatgcttttagcggataaaccacgttaagagcataaaaatgaaggcgttcgatctccaccgtatggcatttgataaagtgccttttgatttccttggcgaagttgcactacgtagtctttatacctttgtactggtctttttgttcctcaaaatgaccggaagacgcggtgtgcggcagatgagcctgtttgaagttttaatcattctgacgctgggaagtgcggcgggagatgtggcgttttatgatgatgtgccgatggtcccggtacttatcgtctttattactctggcgttgttataccgcctggtaatgtggttgatggcgcacagtgaaaaactggaagatcttctggaaggcaagccagttgtcattattgaagatggcgagctggcctggagcaaactcaataactccaacatgacggaatttgagttctttatggagctacgattgcgtggcgtggagcagctggggcaggtacgtctggcgattctcgaaaccaacgggcaaatcagtgtctatttctttgaagatgacaaggtgaaaccgggtttacttattttacccagtgattgtacgcagcgttacaaagtggtgccggagagcgcggactatgcctgtattcgttgtagtgaaatcattcatatgaaagcgggggaaaaacaattatgtccgcgctgtgcaaatccagaatggacgaaggcaagtcgggcaaaacgggtgacctgacagtaaaaacatcggctttttgctaataatccgagagattcttttgtgtgatgcaagccacatttttgccctcaacggttttactcattgcgatgtgtgtcactgaatgataaaaccgatagccacaggaataatgtattacctgtggtcgcaatcgattgaccgcgggttaatagcaacgcaacgtggtgaggggaaatggctcaaatcttcaattttagttctggtccggcaatgctaccggcagaggtgcttaaacaggctcaacaggaactgcgcgactggaacggtcttggtacgagcgtgatggaagtgagtcaccgtggcaaagagttcattcaggttgcagaggaagccgagaaggattttcgcgatcttcttaatgtcccctccaactacaaggtattattctgccatggcggtggtcgcggtcagtttgctgcggtaccgctgaatattctcggtgataaaaccaccgcagattatgttgatgccggttactgggcggcaagtgccattaaagaagcgaaaaaatactgcacgcctaatgtctttgacgccaaagtgactgttgatggtctgcgcgcggttaagccaatgcgtgaatggcaactctctgataatgctgcttatatgcattattgcccgaatgaaaccatcgatggtatcgccatcgacgaaacgccagacttcggcgcagatgtggtggtcgccgctgacttctctagtaccattctttcccgtccgattgacgtcagccgttatggtgtaatttacgctggcgcgcagaaaaatatcggcccggctggcctgacaatcgtcatcgttcgtgaagatttgctgggcaaagcgaatatcgcgtgtccgagcattctggattattccatcctcaacgataacggctccatgtttaacacgccgccgacatttgcctggtatctatctggtctggtctttaaatggctgaaagcgaacggcggtgtagctgaaatggataaaatcaatcagcaaaaagcagaactgctatatggggtgattgataacagcgatttctaccgcaatgacgtggcgaaagctaaccgtagccggatgaacgtgccgttccagttggcggacagtgcgcttgacaaattgttccttgaagagtcttttgctgctggccttcatgcactgaaaggtcaccgtgtggtcggcggaatgcgcgcttctatttataacgccatgccgctggaaggcgttaaagcgctgacagacttcatggttgagttcgaacgccgtcacggttaatgccgaaattttgcttaatccccacagccagcctgtggggtttttatttctgttgtagagagttgagttcatggaatccctgacgttacaacccatcgctcgtgtcgatggcactattaatctgcccggttccaagagcgtttctaaccgcgctttattgctggcggcattagcacacggcaaaacagtattaaccaatctgctggatagcgatgacgtgcgccatatgctgaatgcattaacagcgttaggggtaagctatacgcttagtgccgatcgtacgcgttgcgaaattatcggtaacggcggtccattacacgcagaaggtgccctggagttgttcctcggtaacgccggaacggcaatgcgtccgctggcggcagctctttgtctgggtagcaatgatattgtgctgaccggtgagccgcgtatgaaagaacgcccgattggtcatctggtggatgcgctgcgcctgggcggggcgaagatcacttacctggaacaagaaaattatccgccgttgcgtttacagggcggctttactggcggcaacgttgacgttgatggctccgtttccagccaattcctcaccgcactgttaatgactgcgcctcttgcgccggaagatacggtgattcgtattaaaggcgatctggtttctaaaccttatatcgacatcacactcaatctgatgaagacgtttggtgttgaaattgaaaatcagcactatcaacaatttgtcgtaaaaggcgggcagtcttatcagtctccgggtacttatttggtcgaaggcgatgcatctagcgcttcttactttctggcagcagcagcaatcaaaggcggcactgtaaaagtgaccggtattggacgtaacagtatgcagggtgatattcgctttgctgatgtgctggaaaaaatgggcgcgaccatttgctggggcgatgattatatttcctgcacgcgtggtgaactgaacgctattgatatggatatgaaccatattcctgatgcggcgatgaccattgccacggcggcgttatttgcaaaaggcaccaccacgctgcgcaatatctataactggcgtgttaaagagaccgatcgcctgtttgcgatggcaacagaactgcgtaaagtcggcgcggaagtggaagaggggcacgattacattcgtatcactcctccggaaaaactgaactttgccgagatcgcgacatacaatgatcaccggatggcgatgtgtttcagcctggtggcgttgagtgatacaccagtgacgattcttgatcccaaatgcacggccaaaacatttccggattatttcgagcagctggcgcggattagccaggcagcctgaatgaacaacgggcaataaatagccaaatctttctttatcaaaacgtcggcacattgtcggcgttttttttcggaccttgtgagtcattttgattaatggtagcgtcgcttgtcaatgtaagttgttgatacataatatttatatatgattaatcaacggatgattcacatgaagaatactaaattactgctggcgattgcgacctctgcagcattactgacagggtgtcaaaatacccacggtattgataccaatatggctatcagctccggtttaaatgcctataaagcagcaacattaagcgatgccgatgcaaaagcgattgccaatcagggctgtgccgaaatggacagcggcaatcaagtcgcaagtaaatccagcaagtacggtaaacgtctggcaaaaatcgccaaagcattgggtaacaatattaatggcacgccggtcaactataaggtttatatgaccagcgacgtcaacgcatgggcgatggcgaacggctgtgttcgtgtctacagtggcctgatggacatgatgaatgacaacgaaattgaaggcgttctgggccatgaactgggccacgtcgcgttgggtcacagcctggctgaaatgaaagcttcttatgcgatcgttgccgcacgcgatgccattagtgctaccagcggtgtggcttcccagctttcccgcagtcaattaggtgatatcgcagaaggcgctatcaatgctaaatactcccgtgataaagagtccgaagcagatgatttctcctttgatctgttgaagaaacgtggcatcagcacccaggggctggttggcagctttgaaacactggctagcctggatggcggtcgcacccagtccatgtttgactctcacccaccaagtacagagcgtgcgcaacacatccgtgatcgtatcgcctctggtaagtaaatcattgtcatctttcgggctggtcttctgccagcccgctataattgcgcaataaatccccatctgaatacagacaaaactggtttttgcacacaacgttaacgatttgtggcgtcggcgcgtataatgcgcgcggttatgttaacggtacgcctgttttaaggagataaagatgacggcaattgccccggttattaccattgatggcccaagcggtgcagggaaaggcaccttgtgtaaggctatggcggaagcgttgcaatggcatctgctggacagcggtgcaatttatcgcgtactggcattggcggcattacatcaccatgttgatgttgcgagcgaagatgcgctggtaccgctggcatcccatctggatgtacgttttgtgagcaccaatggcaatctggaagtgatcctcgaaggggaagatgtcagcggcgaaattcgtactcaggaagtggcgaatgcagctagtcaagtcgcggcattcccacgcgttcgtgaagcattattgcgtcgccaacgcgcgtttcgcgaattaccaggtctgattgccgatggccgcgacatgggaacggtggtattccctgatgcaccagtgaaaattttccttgacgcctccagcgaagaacgtgcgcatcgccgcatgctacagttgcaggagaagggctttagtgttaactttgagcgccttttggccgagatcaaagaacgcgacgaccgcgatcgtaaccgagcggtagcgccactggttccggcagccgatgctttagtgttggattccaccaccttaagcattgagcaagtgattgaaaaagcgctacaatacgcgcgccagaaattggctctcgcataagcgaccgaatttgcagtacccccgttgcaatggaatgacagcgggtatgttaaacaaccccatccggcatggagccaggtggacgttaaatataaacctgaagattaaacatgactgaatcttttgctcaactctttgaagagtccttaaaagaaatcgaaacccgcccgggttctatcgttcgtggcgttgttgttgctatcgacaaagacgtagtactggttgacgctggtctgaaatctgagtccgccatcccggctgagcagttcaaaaacgcccagggcgagctggaaatccaggtaggtgacgaagttgacgttgctctggacgcagtagaagacggcttcggtgaaactctgctgtcccgtgagaaagctaaacgtcacgaagcctggatcacgctggaaaaagcttacgaagatgctgaaactgttaccggtgttatcaacggcaaagttaagggcggcttcactgttgagctgaacggtattcgtgcgttcctgccaggttctctggtagacgttcgtccggtgcgtgacactctgcacctggaaggcaaagagcttgaatttaaagtaatcaagctggatcagaagcgcaacaacgttgttgtttctcgtcgtgccgttatcgaatccgaaaacagcgcagagcgcgatcagctgctggaaaacctgcaggaaggcatggaagttaaaggtatcgttaagaacctcactgactacggtgcattcgttgatctgggcggcgttgacggcctgctgcacatcactgacatggcctggaaacgcgttaagcatccgagcgaaatcgtcaacgtgggcgacgaaatcactgttaaagtgctgaagttcgaccgcgaacgtacccgtgtatccctgggcctgaaacagctgggcgaagatccgtgggtagctatcgctaaacgttatccggaaggtaccaaactgactggtcgcgtgaccaacctgaccgactacggctgcttcgttgaaatcgaagaaggcgttgaaggcctggtacacgtttccgaaatggactggaccaacaaaaacatccacccgtccaaagttgttaacgttggcgatgtagtggaagttatggttctggatatcgacgaagaacgtcgtcgtatctccctgggtctgaaacagtgcaaagctaacccgtggcagcagttcgcggaaacccacaacaagggcgaccgtgttgaaggtaaaatcaagtctatcactgacttcggtatcttcatcggcttggacggcggcatcgacggcctggttcacctgtctgacatctcctggaacgttgcaggcgaagaagcagttcgtgaatacaaaaaaggcgacgaaatcgctgcagttgttctgcaggttgacgcagaacgtgaacgtatctccctgggcgttaaacagctcgcagaagatccgttcaacaactgggttgctctgaacaagaaaggcgctatcgtaaccggtaaagtaactgcagttgacgctaaaggcgcaaccgtagaactggctgacggcgttgaaggttacctgcgtgcttctgaagcatcccgtgaccgcgttgaagacgctaccctggttctgagcgttggcgacgaagttgaagctaaattcaccggcgttgatcgtaaaaaccgcgcaatcagcctgtctgttcgtgcgaaagacgaagctgacgagaaagatgcaatcgcaactgttaacaaacaggaagatgcaaacttctccaacaacgcaatggctgaagctttcaaagcagctaaaggcgagtaattctctgactcttcgggatttttattccgaagtttgttgagtttacttgacagattgcaggtttcgtcctgtaatcaagcactaagggcggctacggccgcccttaatcaatgcagcaacagcagccgcttaatttgcctttaaggaaccggaggaatcatgaccaagagtgaattgatagaaagacttgccacccagcaaagccacattcccgccaagacggttgaagatgcagtaaaagagatgctggagcatatggccagcactcttgcgcagggcgagcgtattgaaatccgcggtttcggcagtttctctttgcactaccgcgcaccacgtaccggacgtaatccgaagactggcgataaagtagaactggaaggaaaatacgttcctcactttaaacttggtaaagaactgcgcgatcgcgccaatatttacggttaagttttttactcaaacttgaacgagagaaaagcacctgtcgggtgcttttttcatttctctaatctggaactggaagctgcctcgcagagttttgaacagttttcaccctttcgttaaattcttctgaatatgcctcggggaacgcaaaattcccaccagacaaccgctcaacaaagttgcacactttccataaacagggaggggtgcatgaaaataacgacagtcggtgtatgcataattagcggaatttttccgttgctgattttgccccaattgcctgggacattaacccttgcgtttctgactctcttcgcctgcgtactggcatttatccctgttaaaaccgtccgttatatcgcgctgacgttgctgtttttcgtttggggcatattaagtgcaaagcaaattttgtgggcaggagaaaccttaactggcgcgacgcaggatgcaattgttgagatcactgcaactgacggcatgaccactcattacggtcaaattactcatctacaaggtcgacgtatattccctgcgagtggtctcgtgatgtatggcgaatatcttccgcaagcggtttgtgctggacaacaatggagtatgaaactcaaagttcgtgcagttcatggccaacttaatgatggcggctttgatagccagcgttatgccattgcccagcatcagccgctcaccggccgttttctgcaggcaagtgtcattgaaccgaattgtagcctgcgtgcacagtatctggcgagtctacaaacaacgctgcaaccctatccgtggaatgcggttattcttggtttaggtatgggggaacggttatccgtccccaaagaaatcaaaaatatcatgcgcgatactggaacggcgcatttaatggcgataagcggattgcacatcgcttttgcggcgttgctggctgccggactcattcgcagtggacaaatttttctgcctgggcgctggatccactggcaaataccattaattggcggaatctgctgtgctgctttttatgcctggttgacgggaatgcaacctcctgcattgcgtaccatggtggcgcttgctacgtggggaatgcttaagttaagtgggcgacagtggagtggctgggatgtatggatatgttgtctggcggcaattttgctgatggatcctgttgccattctcagccaaagtttatggctctctgccgctgcggtcgcggcattgatattttggtatcagtggcttccctgtcctgagtggcaactgccgccggtattgcgtgcagttgtttccctcatccatctgcaactgggaatcacacttctgcttatgcccgtgcaaatcgtcatatttcatggcattagtctgaccagctttattgcaaatctattagcaattcccttggtgacatttatcacggttccgttgatcctcgccgcgatggttgtgcatttaagcgggccgttaatcctggagcaagggttatggtttcttgccgaccggtctttggctttacttttctgggggttaaagagtttgccggaagggtggatcaacattgctgaatgttggcaatggctaagtttttccccatggttcttactggtggtatggcgattaaacgcctggcgaacgttgccagcaatgtgtgtggctggaggcttgctgatgtgctggccgctgtggcaaaaacctcgacctgacgagtggcagctgtacatgcttgatgtcgggcaagggctggcaatggtgatagccagaaacggcaaagcgattctctatgacacaggactggcctggcctgaaggggatagtgggcaacaactgattatcccctggctccactggcataatcttgaaccggaaggcgttattctgagccatgaacatctggatcaccggggagggctggatagtatattgcatatatggccgatgttatggatcagaagtccgttaaactgggaacatcatcagccctgtgtgcgtggcgaagcgtggcaatggcaaggattgcgtttcagcgcgcactggcctttacaaggtagcaacgataaaggaaataaccattcctgtgtggttaaggttgatgacgggacgaatagcattcttctaaccggtgatattgaagccccagctgaacaaaagatgctaagccgttactggcagcaagtgcaggcaacattgcttcaggtacctcaccatggcagtaataccagtagtagcttgccattaattcagcgagtgaatggaaaagtggcactcgcaagcgcaagccgctataacgcatggcgactgccctctaacaaagttaagcatcgctatcaactgcaaggatatcaatggattgatactccacatcaaggtcaaacaacggtcaattttagtgcgcaaggctggcggattagcagcctcagggagcaaattttacctcgttggtatcatcagtggtttggcgtgccagtggataacgggtaaaatatgcggctatttcaacaaatgctggttttttgaatgcataacgacaaagatctctctacgtggcagacattccgccgactgtggccaaccattgcgcctttcaaagcgggtctgatcgtggcgggcgtagcgttaatcctcaacgcagccagcgataccttcatgttaagcctccttaagccacttcttgatgatggctttggtaaaacagatcgctccgtgctggtgtggatgccgctggtggtgatcgggctgatgattttacgtggtatcaccagctatgtctccagctactgtatctcctgggtaagtggaaaggtggtaatgaccatgcgtcgccgcctgtttggtcacatgatgggaatgccagttagtttctttgacaaacagagtacgggtacgctgttgagtcgtattacctacgattccgaacaggttgcttcttcttcttccggcgcactgattactgttgtgcgtgaaggtgcgagcatcatcggcctgttcatcatgatgttctattacagttggcaactgagcatcattttgattgtgctggcaccgattgttagcattgcgattcgcgttgtaagcaagcgttttcgcaacatcagtaaaaacatgcagaacaccatggggcaggtgaccaccagcgcagaacaaatgctgaagggccacaaagaagtattgattttcggtggtcaggaagtggaaacgaaacgctttgataaagtcagcaaccgaatgcgtcttcaggggatgaaaatggttagtgcctcttccatctctgatccgatcattcagctgatcgcctctttggcgctggcgtttgttctgtatgcggcgagcttcccaagtgtcatggatagcctgactgccggtacgattaccgttgttttctctagtatgattgcactgatgcgtccgctgaaaagcctgaccaacgttaacgcccagttccagcgcggtatggcggcttgtcagacgctgtttaccattctggacagtgagcaggagaaagatgaaggtaagcgcgtgatcgagcgtgcgactggcgacgtggaattccgcaatgtcacctttacttatccgggacgtgacgtacctgcattgcgtaacatcaacctgaaaattccggcagggaagacggttgctctggttggacgctctggtagcggtaaaagtaccatcgccagcctgatcacgcgtttttacgatattgatgaaggcgaaatcctgatggatggtcacgatctgcgcgagtataccctggcgagcttacgtaaccaggttgctctggtgagccagaatgtccatctgtttaacgatacggttgctaacaacattgcttacgcacggactgaacagtacagccgtgagcaaattgaagaagcggcgcgtatggcctacgccatggacttcatcaataagatggataacggtctcgatacagtgattggtgaaaacggcgtgctgctctctggcggtcagcgtcagcgtattgctatcgctcgagccttgttgcgtgatagcccgattctgattctggacgaagctaccagcgctctggataccgaatccgaacgtgcgattcaggcggcactggatgagttgcagaaaaaccgtacctctctggtgattgcccaccgcttgtctaccattgaaaaggcagacgaaatcgtggtcgtcgaggatggtgtcattgtggaacgcggtacgcataacgatttgcttgagcaccgcggcgtttacgcgcaacttcacaaaatgcagtttggccaatgatcgaaaaaatctggtctggtgaatcccctttgtggcggctattgctgccactctcctggttgtatggcctggtgagtggcgcgatccgtctttgctataaactaaaactgaagcgcgcctggcgtgcccccgtaccggttgtcgtggttggtaatctcaccgcaggcggcaacggaaaaaccccggtcgttgtctggctggtggaacagttgcaacagcgcggtattcgcgtgggggtcgtaagccggggatatggtggtaaggctgaatcttatccgctgttattgagcgcagataccacaacagcacaggcgggtgatgaacctgtgttgatttatcaacgcactgatgcgcctgttgcggtttctcccgttcgttctgatgcggtaaaagccattctggcgcaacaccctgatgtgcagatcatcgtaaccgacgacggtttacagcattaccgtctggcgcgtgatgtggaaattgtcgttattgatggtgtgcgtcgctttggcaatggctggtggttgccggcggggccaatgcgtgagcgagcggggcgcttaaagagcgttgatgcggtaatcgtcaacggcggtgtccctcgcagcggtgaaatccccatgcatctgctgccgggtcaggcggtgaatttacgtaccggtacgcgttgtgacgttgctcagcttgaacatgtagtggcgatggcggggattgggcatccgccgcgcttttttgccacgctgaagatgtgtggcgtacaaccggaaaaatgtgtaccgctggccgatcatcagtctttgaaccatgcggatgtcagtgcgttggtaagcgccgggcaaacgctggtaatgactgaaaaagatgcggtgaaatgccgggcctttgcagaagaaaattggtggtatttgcctgtagacgcacagcttagtggtgatgaaccagcgaaactgcttacgcaactaaccttgctggcttctggcaactaattacgccgcggcagcgttcgattgatggagtcatgaatgagcctgccgcacctctcccttgctgatgcgcgtaatcttcaccttgccgcacaaggcctgttaaacaaaccccgccgtcgagcgagcttggaggatattccggcaacgatctcccgcatgtccttgctgcaaatcgataccatcaatattgttgcccgtagtccatatctggtgcttttcagtcgtctgggaaattatcctgcccagtggctggatgagtctctggcgcgtggcgaattaatggaatactgggcgcatgaagcctgctttatgccgcgtagcgactttcgtcttattcgccaccgcatgctggcacctgaaaaaatgggctggaaatacaaagacgcctggatgcaggaacatgaggcggaaattgcacagttaattcagcatattcatgataaggggccggtacgtagtgccgattttgagcatcctcgtaaaggtgcaagcggctggtgggaatggaagccgcataaacggcatctggaaggtttatttactgccggaaaggtgatggtgattgaacggcgcaacttccagcgcgtttatgatttaacccaccgtgtcatgcctgactgggatgatgagcgcgatctcgttagccaaacagaagcagaaatcatcatgctggataacagtgcgcgtagcctgggaatattccgcgaacagtggctggcagattactatcggctgaaacgtccggcactggcggcgtggcgcgaagcgagggctgaacagcagcaaatcattgctgtgcatgttgaaaaattgggcaatctttggctgcatgatgatttgctgccgctactcgagcgagcgctggccggaaagctcactgcaacgcacagcgcggtacttagcccttttgatcctgttgtctgggatcgcaaacgcgcagagcagctttttgattttagctaccggctggagtgctataccccagcgccgaaacgccagtatggctattttgttctgccgttattacatcgtgggcaattagttgggcgaatggatgccaaaatgcatcgccagacaggcatccttgaagttatctctctgtggttacaggaaggtattaaaccaacgacaacgctgcaaaaagggctacgtcaggcgattactgatttcgctaactggcagcaggcaacgcgggtgacattaggatgctgcccgcaaggcctctttactgattgccgcaccggctgggaaatagaccccgtcgcataaatgattatgataagatttatgcattcataacccgatccatctggaggaactatggatcatcgtctgcttgaaatcattgcctgcccggtttgcaacggaaaactttggtataaccaggaaaaacaagagcttatttgcaaactggacaacctcgctttcccgctgcgtgatggcattccagtgttgctggaaacggaagcccgcgtgctgactgctgatgagagtaaaagttgatgtaaactgctgatgagagtaaatcatgagttttgtggtcattattcccgcgcgctacgcgtccacgcgtctgcccggtaaaccattggttgatattaacggcaaacccatgattgttcatgttcttgaacgcgcgcgtgaaagtggtgccgagcgcatcatcgtggcaaccgatcatgaggatgttgcccgcgccgttgaagccgctggcggtgaagtatgtatgacgcgcgccgatcatcagagtggaacagaacgtctggcggaagttgtcgaaaaatgcgcattcagcgacgacacggtgatcgttaatgtgcagggtgatgaaccgatgatccctgcgacaatcattcgtcaggttgctgataacctcgctcagcgtcaggtgggtatggcgactctggcggtgccaatccacaatgcggaagaagcgtttaacccgaatgcggtgaaagtggttctcgacgctgaagggtatgcactgtacttctctcgcgccaccattccttgggatcgtgatcgttttgcagaaggccttgaaaccgttggcgataacttcctgcgtcatcttggtatttatggctaccgtgcaggctttatccgtcgttacgtcaactggcagccaagtccgttagaacacatcgaaatgttagagcagcttcgtgttctgtggtacggcgaaaaaatccatgttgctgttgctcaggaagttcctggcacaggtgtggatacccctgaagatcttgagcgcgttcgcgctgaaatgcgctaatttcacttcacgacacttcagccaattttgggaggagtgtcgtaccgttacgattttcctcaatttttcttttcaacaattgatctcattcaggtgacatcttttatattggcgctcattatgaaagcagtagcttttatgagggtaatctgaatggaacagctgcgtgccgaattaagccatttactgggcgaaaaactcagtcgtattgagtgcgtcaatgaaaaagcggatacggcgttgtgggctttgtatgacagccagggaaacccaatgccgttaatggcaagaagctttagtacgcccggaaaagcccgacaactggcatggaaaaccaccatgctggcaagaagtgggactgtccgtatgccgactatttatggtgtgatgacgcatgaagaacaccccggccccgatgtcctgctactggagcggatgcgtggtgttagcgtggaggcaccagcccgaacaccagaacgctgggaacaactcaaagaccaaatcgttgaagccttactggcctggcaccgtcaggacagtcgcggttgcgtcggcgcggtcgacaatactcaggaaaatttctggcccagttggtaccggcaacatgttgaagtgctatggaccacgctcaatcagttcaataacaccggtctgacgatgcaggataagcggatcctgtttcgcactcgcgaatgtctcccggcattatttgaaggctttaacgacaattgtgtgctgattcacggtaacttctgtttacgcagcatgttgaaagatagccgcagcgatcagttactggcgatggtcgggccgggactaatgctttgggcaccgcgagaatacgaactgttccgactaatggataattctctggcggaagatttgctctggagttacctgcaacgcgcgccagtggcggagagcttcatctggcggcgttggttgtatgtgttatgggatgaagttgcgcaactggttaataccggacgatttagtcggcgcaacttcgatctggcaagtaaaagtctcttgccgtggctcgcctgatcactcttgccgtggctcgccactgctaccttttagccactgccagatacggccaagcgtttcatagccaacacgatcgctatgcatcaaccagaccggagaagggattgcccgttcccacgggttaagcgggctgtcgatggccaactgattcgccggggctggtagcggatttaacccttcctgctgaaaaaagatcatcgcccgcggcagatgacttgcggaggtcaccagcaggaaaggggcgtcaccaatcgcctgtttcactgctgcagcttcttcttcggtatcttttggcaaatccagggtgataatttgctcgcgcggcacgcccaggctttgcgcaactctggcacctacttccgctgtactcaccgtattggtttttgctacgcctcccgtgaagatcagtttacttcccggattttcgcgccataagcgaataccttcattcaggcgtggcagactgttattgattaaattagagctcggtgcccactgcgggttccaggtataaccacctccgagcaccacgatatagtccactttttggctattattccatgtcggataggtgctttcgatgggacgcagcaggcggtcggctaccggttgcaaactcaataacaagagcgccagccacccaatgctaataaaaatcttcccggttttttgaaaacggctaaaccacagcagcgccaggccagcgccaataatcaacaacatcagcggaagtggcagcaacatattgccaatcacttttttcagtgtaaaaagcatcctttctggttccttttttaaccatatagcaagggatcgccagcgatattacaccagacgggttcattctcgccgtggctgtgacaaaatagcgtctttatcagaaaacgtcttagccaaccggtggagaaagcaatgcaggatcgcaattttgatgatattgcggaaaagttttcccgtaacatttacggcaccaccaaagggcagcttcgacaggctattctgtggcaggatctcgatcgcgtgctggcggaaatgggcccgcaaaaactgcgtgtgctggatgctggcggtggagaagggcagaccgcaatcaaaatggccgagcgtgggcatcaggtcattttatgcgatctttctgcgcagatgatcgaccgcgcaaaacaggcggcagaagcaaaaggtgtgagcgacaacatgcaatttatacattgcgccgctcaggatgttgctagccatttggaaacgcccgttgatctgatattgttccatgcggtgctcgagtgggtggctgatccccgcagcgtattgcagaccctctggagtgtgttgcgtccaggcggcgtgttgagcttaatgttctacaatgcgcatggtttgttgatgcataacatggtcgccgggaattttgattacgtgcaggcgggaatgccgaaaaagaaaaaacggacgcttagcccagattatccacgcgacccggcgcaggtttatctgtggctggaagaagctggttggcaaattatgggtaagacaggcgttcgcgtgtttcatgattatctgcgcgagaaacaccagcagcgcgactgctatgaagcattacttgaattagaaacgcgttattgccgtcaggaaccgtatattaccctggggcgttatattcatgtcaccgcgcgcaaaccgcagagcaaggataaagtatgagtgaattttcccagacagtccccgaactggttgcctgggccagaaaaaatgacttctccatcagcctgccggtagaccgactctcttttctgctggcggttgccacgctgaacggcgagcgtctggatggtgagatgagtgaaggcgagctggtggatgcattccgccatgtgagtgatgcgtttgagcaaaccagcgaaaccatcggcgtgcgcgccaataacgcgatcaacgacatggtgcgtcaacgtctgctgaaccgctttaccagcgagcaggcggaagggaacgcaatttaccgtctgacgccgctcggcatcggcattactgactactacatccgtcagcgcgagttttctacgctgcgtctttctatgcagttgagcattgtggcgggtgagctcaaacgcgcagcagatgccgccgaagagggcggtgatgaatttcactggcaccgtaatgtctatgcgccactgaaatatagcgtagcagaaattttcgacagtatcgacctgacgcaacgtctgatggacgaacagcagcagcaggtgaaggacgatatcgcccagttgctgaacaaagactggcgggcggcgatttccagctgtgaattgttgcttagcgaaacttccggaacgctgcgtgaattgcaggatacgctggaagcggcaggcgacaaattgcaggctaatctgttgcgcattcaggatgcgacgatgacccatgacgatctgcatttcgtcgatcgtctggtgttcgatctgcagagcaaactcgatcgtattatcagttggggccagcaatccatcgacttgtggattggctacgaccgccacgtacacaaatttattcgtaccgcgatcgatatggataaaaaccgcgtctttgctcagcggttacgtcagagcgtacaaacctattttgatgagccgtgggcgctaacttatgccaatgccgatcgtctgctggatatgcgtgacgaagagatggcactgcgcgatgaagaagtgactggggaacttcctgaggatctggaatacgaagagtttaacgagatccgcgaacagctggcggcgatcatcgaagaacaacttgccgtgtacaaaaccagacaagtgccgctggatcttggtctggtggtacgcgaatatctgagtcagtatccgcgtgcacgtcactttgacgttgcgcgtattgttattgatcaggcggtacgtcttggcgtagcgcaagcagatttcaccggactgccagcgaaatggcagccgattaatgattacggagccaaggtacaggcgcatgtcatcgacaaatattgaacaagtgatgccggttaagctggcgcaggcgctggcgaatccgttatttccggcgctggacagcgccttacgtagtggacgccatattggcctcgacgaactggataatcatgcattcctgatggattttcaggaatatctggaagagttttacgcgcgttataacgttgagcttattcgcgcaccagaagggttcttctatttacgcccacgttccaccacgctgatccctcgttccgtcttgagcgaactggatatgatggtcgggaaaatcctctgttatctctatctcagcccggaacggctggcgaatgaggggattttcacccagcaggaactgtacgacgaactgctcaccctggccgatgaagcaaaactgctgaaactggtgaacaaccgtagtaccggtagtgacgttgaccgtcagaagttgcaggagaaagtacgttctagcctcaaccgtctgcgtcgtttaggcatggtgtggtttatgggccacgacagcagcaagtttcgcattaccgaaagcgtgttccgcttcggagccgatgtgcgtgctggcgacgatccccgtgaagcacagcgtcgcctgattcgtgatggcgaagcaatgccgattgaaaatcatctgcaactcaacgatgaaaccgaagagaatcagccagatagcggagaggaagaataatgattgaacgcggtaaatttcgcagtctgacgctgattaactggaacggcttttttgcccgaacttttgaccttgacgagctggtcacgacgctttctggcggtaacggggcgggtaaatccaccaccatggcggcgttcgttacggcgctgatccccgacctgaccctgctgcatttccgtaacactacggaagccggggccaccagcggtagccgcgataaaggtctgcacggtaagctgaaagcgggtgtctgttatagcatgctcgacaccattaacagccgccaccagcgcgtggtggtcggtgtgcgtctgcaacaggttgccggacgcgatcgtaaagtggatatcaagccgtttgccattcagggactgccgatgagcgtgcagccgacacagctggtgaccgaaaccctgaacgaacgccaggcgcgcgtgctgccgcttaacgagctgaaagacaagctcgaggcgatggaaggcgtgcagtttaaacagttcaactccattactgattaccacagcctgatgttcgatctgggcatcatcgcgcgtcgtctgcgctccgcatctgaccgtagcaaattctatcgtctgatcgaagctagcctgtatggcgggatctccagtgccattacccgttctctgcgcgactacctgttgccagaaaacagcggcgtgcgtaaagcgttccaggacatggaagcggcgctgcgtgaaaaccgtatgacgctggaagcgattcgtgtcacccagagcgaccgcgacctgtttaagcatctgatcagcgaagccaccaactacgtggcggcggactacatgcgtcacgccaacgagcgccgtgtccatctcgacaaagccctggagtttcgtcgcgagctacatactagccgtcagcaactggcggctgagcagtacaaacacgtcgatatggcgcgtgagctggcagagcacaacggtgccgaaggcgatctggaagcggattatcaggcggccagtgatcacctgaacctggtgcaaaccgcactgcgtcagcaggagaagatcgaacgctacgaagcggatctcgatgagctgcagatccgtctggaagagcaaaatgaagtggtggcagaagccatcgaacgccagcaagagaatgaggctcgtgcggaagctgccgaactggaagtggacgagctgaaaagccagcttgctgactaccagcaggcgctggacgtccagcaaacgcgcgcgatccagtataaccaggcgattgctgcgcttaatcgtgccaaagaactgtgccatctgccggacttaaccgccgactgcgccgccgaatggctggaaaccttccaggcgaaagagctggaagcgactgaaaaaatgctctctcttgagcagaaaatgagcatggcgcaaaccgcgcacagccagtttgagcaggcttatcagctggtggtggcaatcaacggcccactggcgcgtaacgaggcgtgggatgtcgctcgcgaactattgcgcgaaggggtcgatcagcgtcacctggcagagcaggttcagccgctgcggatgcgattaagcgaactggaacagcgtctacgcgagcagcaagaagctgagcgtctgctggcagatttctgcaaacgtcagggcaagaattttgatatcgacgaactggaagccctgcatcaggaactggaagcacgcattgcctctctttccgatagcgtgtctaacgcccgtgaagagcgcatggcactgcgccaggagcaggaacagctgcagtctcgcattcagagtttgatgcagcgtgcgccggtttggctggcagcgcaaaacagtctcaaccagttgagcgaacagtgcggcgaagagtttacctccagccaggacgtcaccgaatatctgcaacagttgctggagcgtgagcgagaggcgattgttgaacgcgatgaagtgggcgcgcgcaaaaacgccgtcgatgaagagatcgaacgtttaagccagcctggcggctctgaagatcagcgtctgaacgcgctggcggagcgttttggtggtgtgctgctgagtgaaatttatgacgacgttagcctggaagatgcgccgtacttcagtgcgctgtatggcccgagtcgccacgccatcgtggtgccagatctgagtcaggtaactgaacacctggaaggcttgaccgattgcccggaagatctctatctgatcgaaggagatccgcagagtttcgatgacagcgtgttcagcgttgatgagctggaaaaagcggtagtggtgaaaatcgccgatcgtcagtggcgttatagtcgtttcccggaagtgccgctgtttggtcgtgctgcgcgtgaaagccgtattgaaagcctccatgccgagcgtgaagtgctttccgaacgcttcgccacgctctcctttgatgtacagaaaactcagcgtctgcatcaggcgttcagccgctttatcggcagtcatctggcggttgcgtttgagtctgacccggaagcagaaatccgtcaactgaacagccgtcgcgtcgaactggagcgggcgttaagtaatcatgaaaatgataaccagcagcagcgtattcagtttgagcaggcgaaagagggcgttacggcgctgaaccgcattctgccgcgtctcaacctgttggctgatgacagcctggcggatcgcgtcgatgaaatccgcgaacgtctggatgaagcccaggaagccgcgcgttttgttcagcagtttggcaatcaactggcgaaactggaaccgattgttagcgtattgcagagcgacccggaacagttcgaacagttaaaagaagattacgcgtactctcagcagatgcagcgcgatgcccgtcagcaggcgtttgccctgacggaagtggtgcagcgtcgtgcgcactttagctattctgacagcgcagaaatgcttagcggtaacagcgatctcaacgaaaaactgcgtgaacgtctggaacaggcggaagcggagcgtacccgcgctcgcgaagcgttgcgcggtcacgcagcgcagttgagtcagtacaaccaggtgctggctagcctgaaaagttcttacgacaccaaaaaagagctactcaacgatctgcaacgtgaattgcaggatatcggcgtgcgtgctgatagcggggcagaagagcgggcgcgtattcgccgtgacgagctgcatgcgcaactgagcaataaccgtagtcgccgcaatcaactggaaaaagcgcttaccttctgcgaagcggagatggacaacctgacccgcaaactgcgcaagctggagcgggattactttgagatgcgcgagcaggtagtgaccgccaaagcgggctggtgtgcggtgatgcgcatggtgaaagataacggcgttgagcgccgcttacaccgtcgtgagctggcttatctctccgctgatgatttgcgttccatgagcgataaggcgttaggtgcgctgcgtctggcggtggcggataacgaacatctgcgcgacgtgctgcgcatgagcgaagatccgaaacgtccggagcgtaaaattcagttcttcgtggcggtttatcagcatctgcgtgaacgtattcgtcaggatattattcgtaccgatgatccggtggaagctatcgaacagatggagattgaacttagccgtctgaccgaagaattaacctcccgtgaacagaaactggcgatcagttcccgcagcgtggcgaacatcattcgcaaaaccattcagcgcgagcagaaccgtatccgtatgctcaaccaggggttgcagaacgtaagctttggtcaggtgaacagcgtgcgtctcaacgtgaacgtgcgtgaaacgcacgccatgctactggatgtgctctctgaacagcacgagcagcatcaggatctgtttaacagcaaccgtttgaccttcagcgaagcgctggcgaaactgtatcaacgtcttaacccgcagattgatatggggcagcgcacgccgcagaccatcggtgaagaactgctggattaccgcaactatctggaaatggaagttgaggttaaccgtggttccgatggctggctgcgcgcagagtctggtgcattgagcaccggtgaggcgattggtaccggtatgagcattctggtgatggtggtacaaagctgggaagatgaatctcgccgcctgcgcggtaaagatatctctccttgccgcctgctgttcctcgatgaagcagcgcgactggatgctcgttctatcgccacgctgtttgaattgtgtgagcgtttgcaaatgcaactcatcatcgcagcgccggaaaatatcagcccggagaaaggcaccacctataaactggtgcgtaaagtcttccagaataccgaacacgttcatgtcgtcggcctgcgaggatttgcgccgcaactccctgaaacgcttccaggaactgacgaagcgccttctcaggcgagttaaaattaaggcggcagcaatgccgccttttctttttccgaaaactccgtttctgcactaaaaaagtggcacattacggcgcgcttttctttaaacttctttacattaggttatgtaaaaacgtatcggcgtttatatactgaagataagcctgatgagtaacaggcttgctcgtcatactttcgtgagtattggcgttgtacaggcaagtcgtaaaataacagcctggctattcagagtatgataaaaacagggggcaagggatgttgcttaatatgatgtgtggtcgtcagctgagcgcaatcagtttgtgcctggccgtaacattcgctccactgttcaatgcgcaggccgatgagcctgaagtaatccctggcgacagcccggtggctgtcagtgaacagggcgaggcactgccgcaggcgcaagccacggcaataatggcggggatccagccattgcctgaaggtgcggcagaaaaagcccgcacgcaaatcgaatctcaattacccgcaggttacaagccggtttatcttaaccagcttcaactgttgtatgccgcacgcgatatgcaacccatgtgggaaaaccgtgatgctgttaaagccttccagcaacagctggcagaggtggcgattgccggtttccagccgcagtttaataaatgggtagagttactgaccgatcctggtgttaacgggatggcacgcgacgtggtgctctctgatgcgatgatgggctatctccatttcattgcaaatattccggtcaaaggcactcgctggctatatagcagtaaaccttatgcacttgcaacgccgccgctcagcgtgattaaccaatggcagctggcgctggataaaggtcaattgcctacgtttgttgcaggactggcaccgcagcatccgcaatatgcggcgatgcatgaaagcttactggccttactctgtgacaccaaaccgtggccccaactgaccggcaaagcaacgttgcgcccagggcagtggagtaacgacgtaccggcgttgcgcgaaatattgcaacgcacaggcatgttggacggggggccgaaaattactctacctggcgatgacacgccaactgacgcggtagtcagcccatccgctgttactgttgaaacagcagaaactaagccgatggataagcaaacgacgtctcgtagtaaacctgcgcctgccgttcgcgccgcctacgataatgaactggtggaagccgttaaacgttttcaggcatggcaaggattgggggcagatggtgctattggcccggcaacacgtgactggttaaacgtaacgcccgcccagcgtgctggtgtgttggctctcaacatccagcgattgcgcttgctgccaacagagctttctaccgggatcatggttaacattccggcctatagcctggtctactatcagaacggcaatcaggtgctggatagccgagtcattgtcggtcgccccgatcgcaaaacgccgatgatgagcagtgcccttaacaacgtagtggtaaacccgccgtggaacgtacctccaactctggcacgcaaagatattctgccaaaagtgcgcaacgatccgggatatctcgaaagccatggctatacggtgatgcgcggctggaacagcagagaagcgattgacccatggcaggttgactggtctacaatcacggccagcaatttaccgttccgcttccagcaggctccaggcccacggaacagcctggggcgctataaattcaatatgccgagtagtgaggccatttatttgcatgacacgccgaaccacaatctgttcaagcgtgatacacgcgcattgagcagtggctgtgtacgagtgaataaagcttccgatctggcgaatatgctgttgcaggatgcaggctggaatgacaaacgtatttctgatgcgctgaagcagggtgatacacgttacgtcaatattcggcagagcattccggtgaatctctactacctgacggcctttgttggtgcagatggtcgtacccagtatcgtacagatatttacaattatgatctgcctgcgcgatccagcagccaaatcgtaagcaaagcggaacaattaatcaggtaaatgaagtagttcggggaaatcagttgtcgtaataattagcatgattgggggcgattctctgcagcccccgtcactgctggggttgagtcatcttgacgtctgctttacgggcggttaaggtgcctcttgtgcgccagaagtgcatataaacgataacattgacctgtagacttgattatcatggacaaattcgacgctaatcgccgcaaattgctggcgcttggtggcgttgcactcggtgccgccatcctgccgacccctgcgtttgcaacactctctaccccacgcccgcgcattttgacactcaataatcttcataccggagagagtatcaaagcggagtttttcgatggcagaggctatattcaggaagaattggcaaaacttaaccattttttccgcgattaccgcgcgaacaaaataaagtccatcgacccaggattattcgaccagttgtatcgcctgcaagggttgttaggcacgcgcaaaccggtgcaactcatttccggttatcgttctattgataccaacaatgaactacgcgcccgcagccgtggagtagcgaagaaaagctatcacactaaaggccaggcgatggatttccatattgaaggtatcgcgttaagcaatattcgcaaagccgcgttatctatgcgcgcaggtggtgtaggatattatccacgtagtaactttgtgcatattgataccgggccagcacggcactggtaataattgcttaacgaaacaggggcagtatgaactatcgtattattccggtcaccgcattctcccagaactgtagtttaatctggtgtgaacaaacccgtctggccgcactggtcgatcctggcggcgatgcggaaaaaatcaaacaggaagttgatgacagcggcctgacactgatgcagatcctgctgacgcatggtcatctggaccacgttggcgcagcggcggaactggcgcaacattacggcgtgccggttttcggcccggaaaaagaagatgagttctggctgcaaggcttgcctgcgcaaagtcgtatgtttggtctggaagagtgccagccgctgacgccagatcgttggctgaacgaaggcgataccatcagcatagggaatgtgactttacaggtgttacattgccctgggcatacgccgggtcatgtcgtgttttttgatgatcgggcaaagctgctgatttctggcgatgttattttcaaaggcggagtagggcgcagtgacttcccgcgtggcgatcataatcaactgatttctagtatcaaagataaattgctgccactgggggatgacgtgatatttattccgggtcacggaccattatccacacttggttatgaacgcctgcataatcccttcctgcaagacgaaatgcccgtctggtaaggcacataaaaaagcccgcttttaatgctggcctggatttctggcaaagtgcgctttgtttatgccggatgcggcacgagcgccttatccggcctacaaaatcgtgcaaattcaaaatattgcaggggacgcgtaggcctgataagcgtagcgcatcaggcaatgttgcgtttgtcatcagtctcagcccgcttttcagcgggcttcattgtttttaatgcttacagcactgccacaatcgcttcgcacagcggagccatgttatctggtgtcatcccggccacatttacgcgaccagaagcaaccgcatatacgccaaactcttcgcgcagacgcagcacttgttcttttgtcaggccactgaaggagaacatgccgttctgtttgatgataaagctgaagtcgcggtttgcgcctttttcctgcagcgtattgacgaacaactgacgcatacgctgaatacgctggcgcatatcagtcagctcttgttcccaaatcgcacgtaacgcatcgttgctcaggatggtggcaacaacagaagcgccgtgtgctggtgggttagagtagttagcgcgaatcgccgctttcatttggctgaatgcgcgatcaacggtttcactgtcggcagcaaccagagtacaagcgccaacacgctcgttgtacaggccaaagtttttagagtaggaactggcaacaatcagctctttatgcatagccgcgaaagcgcgcagtccttcagcatcttcttccagaccacgggcaaaaccctggtaagcgaagtcaaacagcggtaaccagcctttctcaacggagagttgtgccagtgtttgccattgttccagcgtagggtcgataccggttgggttatggcagcagccatggaacagcactacgtcgccagcctgagcttcattcaggctgttaatcagtgcatcgaagtcaagagtgtgattttccgcatcataataagcgtattcacgaacttccagacctgcagagttaaagacgctcttatggttcggccagcttgggttgctcacccacacacgcttaacgctggtattttttgccaggaaatcggcagccacgcgtagtgcgccagtgccccccggagtctgtgccgtgcgagcacgtttgtcattgatcagggcgctacctttaccaaacagcagttcctgagtgcagcgaccaaattcagggatgccgtcaatgccgaggtaatttttggtggtttcattttcgagcagatactgttcagcctttttcacgctggtcagtaccggggttttgcccgtctcatctttatagacaccaatcccgaggttaattttgccgggacgttcatcggcacgaaacagatcggccaggcccagaatcgggtcggcaggagcggcggtaatgttctcaaacatgacgaggttccattatggttacagaagggaagtccgctatcagggtaacgggagatttacaaaattccaactattactgatgaaaacgcaggctgtttttgcaagacgtgagattgctctggaaggtataaaaaaaacaggaccaaagtcctgttttttcggcatttaacaaagaggtgtgctattagaactggtaaacgatacccacagcaacggtgtcgtcactacctacgcccagtttgttgtcagaatcgatctggttgatgatgtagtcaacataggtggacatgtttttgttgaagtagtaggttgcgcccacttcaaagtagttcaccagatcaacatcaccgataccttctacgtctttcgctttagatttggtgtaagcgatggacggacgcagaccgaaatcgaactggtattgcgcaactaacagaacgtcttgcgttttgttggcgaagccgctggtgtttgtaaatttattagtgatcggcgtagcgttacgggtttcaccgtagttcgctgccaggtagatgttgttcgcgtcgtacttcagaccagtagcccactgttcagcttttttaccgttgccaagaggttgagcttcttgcaggttggtacggtcagctgcaccataagcaccaacgataccaaagccttcgtattcgtagctgatagaaccgccaacaccgtcgccgttagaacggcgtgcagtgtcacgctcgtttttacccaggtactgaacagcgaagttcaggccatcaaccagaccaaagaagttggagttacgataggtagcaacgccgccaacacgaccaacgaagaagtcatcgctgtatgcagtatcaccaccaaattctggcagcatatcggtgtaacccagtgcatcataaaccacaccgtagttacggccgtaatcgaaagaaccaacgtcagcgtatttaagacccgcgaatgccagacgcgttttgttaccagtttgagcgtcagcgccttcagagttgttaccctggaagttatattcccactgaccataaccggtcagatcggaattgatttgagtttcccctttaaaaccaagacgggcataggtcatgtcgccattgccaccgtaactgttttcaccgttacccttggaaaaataatgcagaccaacagctttaccgtacagatctactttgttgccatctttgttatagatttctgcagcgtttgcagtacctgctactaacagagcagggacgatcactgccagaatattgcgcttcatcattatttattaccctcatggttttttttatgacacctgccactgccgtcaataagttctgtcaataaaaatttacggaactattgatgagagtttggtgtctttatgtgtctgcaggcatctttccattcaaactaacgtttcgctaccgtgaaagtgctacaaagataaagatttggtttcaaaaagaaaaaatatgtaaccaaaagtaaaatttaaggaactttgtgaacaccgtcatatttccatagagacgtgatgatatttacagcaattttaatctatttatatgatttccttatatttaaattaactaaacggaaattttgtttctgatggaaactttatcgacctggcacaaaatcttctttcagacatccagaatgccaaaaaatagtatgaaaattgtgctattagctaagaaaaaactaatccgcaataagaatgcggattagtttttgcgcgtaaatgttgcaatgtaatattccgtaacaggatgatcgttatggcggggttgcaaatagattgcttgacttaacaaacagataacttgacagaaaagataaaaaaagagccagcgggcgctggctcttgaagacgctaaattagaagctggcgttacgcggagtacgtgggaacggaatcacatcacgtacgttttgcacgccagttacgtaagcaatcagacgttcaaaaccaagaccgaaaccactatgcggaacagtaccgtagcgacgcagatcgcgataccaccagtaatcttctttattcaggcccatttccagcatacgctcgtccagcacgtccagacgttcttcacgctgggagccaccaatgatctcaccgatgcccggagccagaacgtccatagccgcaacggttttaccgtcttcgttaaggcgcatatagaacgctttaatatctttcggatagtttttaaccactaccggtgctttaaagtgttcttccgccagataacgctcatgctcagaagagagatcgactccccagtaaaccgggttttcaaacttcctgccgcagttttcgagaatggtcactgcgtcggtataatccacctgcgcaaaatcggcttcaatgaagcgttccagacgactaacggcatctttatctacgcgttcagcgaagaatttcatgtcgtcagcgcgttcttcgagaaccgctttgaagacatatttcagcatggcttcagccagacccgcaatatcgttcaggttagcaaacgccacttccggctccagcatccagaattccgccaggtgacggctggtgttggagttttcagcacggaaagtcgggccgaaggtataaattttggacaatgcgcaagcgtaggtttcgccgttcaactggccagatacggtcaggaaagactctttaccaaagaagtctttgtcgaaatccactttgccctgatcgttacgcggcaggttttccagatccagcgtagaaacgcggaacatttcgcctgcaccttcggtatcagatgcggtaatcagactcgtactaacccagaagaatccctgctcgttaaagaagcgatgcagcgcctgcgccagcgtatggcgaacgcgcgcgacggcaccaatcaggtttgtgcgcggacgcaggtgagcgacttcacgcagatactcaatgctgtggcgttttgccgccatcgggtaagtgtctggatcttcaacccaaccagcaacttcaaccttgctggcctgaatttcaaattgttgcccctggcccgggctcgccacgactttacccgtcacaatgacgctgcagccggtggtcagacgcaggacgtcttcattgtaattgggcagagaattattgatgacagcctgtacaggatcaaagcaggaaccgtcataaacggcgaggaaggagatgccagctttactatctcggcgggtacgtacccatccgcgcacggtgacttcgctgtcaacggctacacggccctggagtacgtcggctacaggcacaacgctcataatattctctctgttaatagtcggaaaaataaacacttgtccacccgtaaatggggggatacctatgttacctggcatctgcaatcagacaagcagaattcgcaaatgcagcgaaagatttcggaattaaaggtaaaaaaagggagccgattagctccctgatgatattaactggcttttttaatatgcggaaggtcgaacgctttgcgcagcgcccgaacaaacgctttatcatggcagatagttttgccagggctgtcagaaagtttcgccaccggtttaccgttacactctaccaacttaatgacaatattcaggggttttacctgggggatatcgcaggtcaggcgagtcccaataccaaaacttaattgcacgcgggaagagaagtggcggtatagctcaaccgctttgcgtaaatccagattgtcagagaaaaccagcgttttactctgtggatcaattcccagcttttcataatgtgcaatggctttttcaccccattcaaccgggtcgccagagtcatgacgcaggccctgataccgactagcgaactcgacaccgaaatcacgcaggaaagcatccatagtgatgcagtcggttaatgcaatgccaagttggtcgggatactcttccagccaggcagcaagtgcagctcgctggctgttggctagatccgggctgatttgctgatgtgcctggaaccattcgtgtgcctgtgttcccatcggcgtgagggaaagccgacgcgccagatcgtagttgctggtgcccacaaaccaggattcctgttgcagacgcttaacgatggtttcttgtacttcgcgagaaaaacggcgacgggtgccaaaatccatcagatggaagcggctcatatcaagaccggcggttaacgcgctgaagtcgactaatttgctttccagcgtgtcgagggcttgcgcaacgtcggcctgcggactgcgatagcgatgtaccatttcactgataaccgccagcaaaggaacttcccagaggatgacttcacgccacgggccgcttaaacgaatatccagcttgccattatcgttggacacggtgacttgttccgggttaaagcggaactcgcgtaaccagttaagatagtcggccttaaagaaaggcagggcagaaagccactgatattcatcatcctgcaggcgcaggtgctgcatcgcctgaacctgttcacgaatagcatcggcataaatacccagcagatcgtcacctcggcaacgaaactccgccgcgacatgcacatcgtaatagtgatgaaacacggcttgctgcatatgcaacttataagcatctgtatccagcaagctgtgcagaacaggagaagcgaattgtgtcataggtgcgcagtagcgtcctcgtacaggagcgtttagtacaataaacatcttcaggaactgctggagtataccttgtttcgcaatttattgaaccccgatcacaccatatgccacctttctggtcgatggcattacgcggtgtatgttataaaaatgtagcaataaaggcgtttgtacctgaaaagatgaagattctgcatagcgcgatttacgcaacaggaatagactgaacaccagactctataaaagatgctaaaggttatttatgactcaacagccacaagccaaataccgtcacgattatcgtgcgccggattaccagattactgatattgacttgacctttgacctcgacgcgcaaaagacggtcgttaccgcggtcagccaggctgtccgtcatggtgcaagtgatgctccccttcgtctcaacggcgaagacctcaaactggtttctgttcatattaatgatgagccgtggaccgcctggaaagaagaagagggcgcactggttatcagtaatttgccggagcgttttacgcttaagatcattaatgaaataagcccggcggcgaataccgcgctggaagggctttatcagagtggcgatgcgctttgcacccagtgtgaagccgaaggtttccgccatattacgtattatctcgaccgcccggacgtgctggcgcgttttaccaccaaaattattgccgataaaatcaaatatcccttcctgctttccaatggtaaccgcgttgcgcaaggcgaactggaaaacggacgccattgggtacagtggcaggacccgttcccgaaaccgtgctacctgtttgcgctggtggcaggcgactttgatgtactgcgcgatacctttaccacgcgttctggtcgcgaagtagcactggagctgtacgtcgatcgcggcaaccttgatcgcgcgccgtgggcgatgaccagcctgaaaaactccatgaaatgggatgaagaacgctttggcctggagtatgacctcgacatctatatgatcgtcgcggtggatttcttcaatatgggcgcaatggagaataaggggctgaatatctttaactccaaatatgtgctggcccgcaccgacaccgccaccgacaaagattacctcgatattgaacgcgttatcggccatgaatatttccataactggaccggtaaccgagtgacctgtcgcgactggttccagctcagcctgaaagaaggtttaaccgtcttccgcgatcaggagttcagctctgaccttggttcccgcgcagttaaccgcatcaataatgtacgcaccatgcgcggattgcagtttgcagaagacgccagcccgatggcgcacccgatccgcccggatatggtcattgagatgaacaacttctacaccctgaccgtttacgagaagggcgcggaagtgattcgcatgatccacaccctgcttggcgaagaaaacttccagaaagggatgcagctttatttcgagcgtcatgatggtagtgcagcgacctgtgacgactttgtgcaggcgatggaagatgcgagcaatgtcgatctctcccatttccgccgttggtacagccagtccggtacaccgattgtgaccgtcaaagacgactacaatccggaaaccgagcagtacaccctgaccatcagccagcgcacgccagccacgccggatcaggcagaaaaacagccgctgcatattccgtttgccatcgaactgtatgataacgaaggcaaagtgatcccgttgcagaaaggcggtcatccggtgaattccgtgctgaacgtcactcaggcggaacagacctttgtctttgataatgtctacttccagccggtgcctgcgctgctgtgcgaattctctgcgccagtgaaactggaatataagtggagcgatcagcaactgaccttcctgatgcgtcatgcgcgtaatgatttctcccgctgggatgcggcgcaaagtttgctggcaacctacatcaagctgaacgtcgcgcgtcatcagcaaggtcagccgctgtctctgccggtgcatgtggctgatgctttccgcgcggtactgcttgatgagaagattgatccagcgctggcggcagaaatcctgacgctgccttctgtcaatgaaatggctgaattgttcgatatcatcgacccgattgctattgccgaagtacgcgaagcactcactcgtactctggcgactgaactggcggatgagctactggctatttacaacgcgaattaccagagcgagtaccgtgttgagcatgaagatattgcaaaacgcactctgcgtaatgcctgcctgcgtttcctcgcttttggtgaaacgcatctggctgatgtgctggtgagcaagcagttccacgaagcaaacaatatgactgatgcgctggcggcgctttctgcggcggttgccgcacagctgccttgccgtgacgcgctgatgcaggagtacgacgacaagtggcatcagaacggtctggtgatggataaatggtttatcctgcaagccaccagcccggcggcgaatgtgctggagacggtgcgcggcctgttgcagcatcgcagttttaccatgagcaacccgaaccgtattcgtagcttgattggcgcgtttgcgggcagcaatccggcagcgttccatgccgaagatggcagcggttacctgttcctggtggaaatgcttaccgacctcaacagccgtaacccgcaggtggctagtcgtctgattgaaccgctgattcgcctgaaacgttacgatgccaaacgtcaggagaaaatgcgcgcggcgctggaacagttgaaagggctggaaaatctctctggcgatctgtacgagaagataactaaagcactggcttgataaataaccgaatggcggcaatagcgccgccattcggggaatttacccctgttttctcaggcgagtttcagattcaccacgttgcatcacccgttgcaacacctccgcttccagctccgctaatcgcacgctccctaatcgacgcggacgggggatatccactgtcaaatccagaccaatttttccctcttcaattaacagcacccggtcagccatcgctaccgcttcgctcacatcatgcgtcaccaacagtacggtaaagccgtgctcctgccaaagactcacaatcaaatcctgcatctcgagtcgcgttaaggcgtccagcgccccgagcggttcatcaagcaacaataatcccggtcgatgaatcaacgctcttgccagcgccactcgctgtttctgcccgccagaaagtgcggcaggccattcccctgcgcgattctccagtcctaccgcagccaacgctcgacgtgcggcatcgcgccactggcctttaaggcctaacccaacgttatcaatcacgcttttccacggtagcagacgcgcatcctgaaacatcattcgcgtgtcttcctgaatttcagccagcggtgtggtgcccgctaacacatcgcctgcggttggcgtttccagacctgccagcaggcgcagcagggtacttttgccaccaccgctgcggcccaccaccgccacaaactgacctgccggaatatgtaaatccagttggttcaggacgatattttccgcgtaatgtttgcttactgcattgagcaacaatggcgtgccctggttcagacgagcagtattcataccgtggcctccttcaaatgataagccgggttccagcgcaaccagaggcgctctaacagctgcgcgctgacgtcagccagtttgccgagcagggcgtaaagaataatagcgactaccaccacgtccgtttgcaaaaacccccgcgcattcatcgccagataaccaatgccactattggcagaaatggtttcggcaacaatcagcgtcagccacatcaggcccaacgcaaaacgcacgccgaccataatactgggcagggcaccaggcaggatcacatggataaacagcggtatgccggataatccatagctacgcgccatctccaccaacccgcgatcgatattacggatgccatgccaggtgttgatataaatggggaatagcgtaccgagcgccaccagaaagatttttgcggattcatcaatgccaaaccacaaaatcaccagcgggatcagcgccagatgcggcacgttgcgcaacatctgaatactggtatccagcagccgttctccccagcgagatagcccgctaatcagtcccaaaatcaaccccaggcttccgccaatactaaagccaatcagcgcccgccaggagctgatcgccagatgctgccacagttcgccgctggcggagagcgtccagaacgccgtcaccactccttccggactaggcaaaatacgcgtgctcagccagccaacgctggaggccagttgccacaccgccacgatgcccaccggtaaaaaccagggggcaacgcgcaataaccacttcttcactggcgttgccattatttcttccttagctttgcgcgactttacgggggataaaatcattcgccaccgcttcgccttgcggattcagcggctgcggctggggaatttccgggatggcgacatccagaagcgggaacagcaactcgccaacccgatacgcttcttccagatgcggatagccgctaagcacaaaactgtcgatgccaagcgcggcatattcgttgattcgcgcagcgaccgtaggaccatcgcccaccagcgccgtcccggcaccgccgcgcactaagccaacgcccgcccataaattggggctgatctccagattgtcgcgcttgccgttatgtaacgccgccattcgctgttgccctacggaatccgtccgggcgaatgcggcctgtgctttggcgatagtttcatcatcaagatggctgattaaccgctcggcggcctgccacgcttcgtcgttagtttcacgaacaatcacatgcagacgaataccgaaacgaattttgcgtccatgcgcggcagctttcgcccgcacttgttcgattttctctttaaccagttccggcggttcgccccaggtgaggtagagatcaacctgttctgccgccagctcctgggcgacatcactgcttccgccaaagtaaagtggcggatacggctgttgaatcgccgggaagagcagttttgctccgcgcacatgaatatgtttaccgttgaaatcgacggtttctctctgcaataaacgccgccagacctgggtaaattccgcgctggcttcgtagcgctcgctatgatcaaggaacactccgtcgcctgccagctcttgtggatcgctgcctgtgaccaggttaaacaacgcacgtccattactgagacggtcaagcgtggcggcctggcgggcggcaacggtaggactggttacgctgggacgcagggcgacaagaaacttcagccgctgcgtcaccgggatcatgcttgcggcaaccagccacgcatcttcgcaggagcgccccgttggaattagcacaccggtatagccaagacgatccgccgcttgcgcaatttgttgcagataaccgtgatcaaccgggcgactaccttcttccgttcccagataatgcccgtcaccgtgggtcggtaaaaaccagaacatattcagactcataattgttttccttccagttgagtgggctgccagatgcgctggcgaatatcgacttttttcggcaccagacgattttcataaaacagatctgccgtttgctgctgtaaggcggcaacctcggcgttaaccggtttgatggtggtaggagggcgatgatctaagtaagaggcaatcaccggtgccggtaagcccatcgtttttgccagtaaagcgatgctttgctcgcgctggctgcgggttaacgcatcggcctcactaaaggttgccagtacgccctgaataaaagcgccgtttttttctgcatagggacgagctgccagataaaagcttccagtttgattgagatcggtgccgtctttcagcacccgcacgccgccctgtaataatgcagcagagtagtagggatcccagatagcccaggcgtcaacgttaccttgctggaacgcggcgcgggcatcagcgggcgtcaggtaagtgggttggatatcggtaaacttaagtccggcctgacgcagtgcacgcagtaaaaggttgtgactactggaacctttctgaaaggcaactttgtgacctttaagatcggctacggttttgatcgggctgttttctgccaccagaatcacttcggctttgggcttcggtggctcgacgcccacgtacaccaaatcagccccggcagcctgggcaaagattggcggaatatccccggtactgccgagatcaatactgccaacgtttaacgcttccaacatttgcggacccgcggggaactccacccaggagattttactttccggatagcgtttttccagtaactggtggctttttgccagcaccataccaatactgcctttctgatagcctatacgtaacgcttcagggctggattctgcagcaaccgcaaaagtagagacgctaagcaatcccgccagcgccagtttaatgatgttacgcatgggcattacctcgcagagacagaaggtcaggaacctgaacatcgcggcggtgcaatgcctgccagaaagtttctagcgcggtatcaagacgggtttgcagatttggcgtgaactggggtctgtgatggtaatcaattacttgactgtcatcggcaaacacgccgtgcaggatctcctgagctttcagtgcgcttaaaactggtttaagggcataatcgaccgccagcagatgggccacggtaccgcccgtcgccagcggtagcaccactttgccttgcaaagcgcgttctggcagcaggtcgagcagggttttcaacgcaccggaataggcggctttatacacaggcgtggcgacaatcagcccatcggcctgttgcagctgttcggtgaaggtcttgagtgccggactatcgaaacgagcataaagtagatcttccggggcgaagttttgcagattccagtgataaacctctacatccaggccatttagtttttcccgcgcatattccagcaaggagctggagcgagaaggaaagcgaggactacccgccagggtgatgacacgcatactctctccttataaccaattgttctttttttgttaacattgataacaattcggtcagtctgtcggagagacaagaaaattccaaatataaattttgtgtatctttttctgaaaataaactaaagaaagggctttatatatcacgcatatttatttattggatagtcattagatgttgaatcaatgaattactcgttcagttaatatttaaatattcatgaaatctataaattaaagatttgtcacttattggatttagtatgcttgatttaaatggcggacaattattgttattattaagtctaatgtcatttaaaggcattatcatatttacgaagagatcaggatgataacgatgaaaaaaagtgtattgacggcgtttataactgtggtatgtgcaacgtccagcgttatggctgctgatgataatgctatcacggatggcagtgtaacatttaatggtaaagttattgctccagcttgtaccctggtagctgcgacgaaagattccgtggtgactttgccagatgttagtgccacgaagttgcaaaccaatggtcaggtttctggcgtgcaaattgatgtgccaattgaattaaaagattgtgatactaccgtaacaaaaaatgcaacgttcacctttaatggcactgcggatactactcagattacagcgtttgctaaccaggccagttctgatgctgctacaaacgtggccctgcaaatgtatatgaatgatggtacaacggccatcacgccagacacagaaaccgggaacattttgttgcaggatggagatcagacgttgacttttaaagttgattatatcgctacggggaaagcgactagtggtaatgtgaatgcggtaacaaatttccatattaactattattaatagaactcattaattgttttattaattagtacccctccagtgttctggaggggatattcatattttttaagagtgactatttatgaaaacttgcataacaaagggaattgtgaccgtaagtttaacggcaatattactcagctgcagttccgcatgggcggcaggtaaaggcgggattggacttgcagcaacacgtcttgtttatagtgaaggtgaagagcaaattagtctgggtgtacgtaacaccagtccggatgttccttatcttattcagagttgggtgatgaccccagataataaaaaaagtgcagactttattattacaccaccgctatttgtgctgaatccggcaaatgagaatctgttacgcattatgtacattggagcgccgttggcgaaagacagagaaacccttttcttcactagcgtacgggcagtccctagtacaacgaagcggaaagagggaaataccctgaagattgccacacaaagcgtcatcaaacttttctggcgaccaaaaggtttagcgtatcccttaggcgaggctccggcgaaactgcgttgcactagcagtgctgacatggttacggtcagtaacccaacaccttatttcattaccctgacagacctgaaaataggtggaaaagtagttaaaaatcaaatgatttccccctttgataaataccaattttctctgccaaagggggccaaaaatagcagcgtaacgtatcgaaccatcaatgactacggggcggaaacgccgcaactcaactgtaaaagctaagccgtcttcagttaagagagcgagatgtatagaactcatcgacaacacagcctgttaagctctggtggagtgccaagctttattggtgggctggtggtgtttgtgagcgcagcgttcaatgcacaagctgaaacctggttcgatcctgcttttttcaaagatgatcccagtatggtggccgatttgtctcgtttcgaaaaaggacaaaaaataacgccaggggtttatcgtgtcgatattgttctgaatcagacaattgtagatacgcgcaacgtcaattttgttgagataacgccagagaaggggattgccgcctgtttgacgactgaaagcctggatgcaatgggtgttaatactgatgcgtttccggcttttaaacaactggacaaacaagcgtgtgtgccattggcggagattattccggatgccagcgtaacgtttaatgtgaataaactccgtctggaaattagtgtaccgcaaatcgccatcaaaagtaatgcccgtggttatgtcccccctgaacgttgggatgaagggatcaacgcgctattactgggatatagctttagcggggctaacagtattcatagcagcgcagacagtgattctggcgacagctattttctgaatttaaacagtggcgttaatttaggcccatggagattgcgcaacaatagtacatggagtcgtagtagtggccaaaccgcagaatggaagaatctcagcagctatttgcaacgggcggttattcctctgaaaggcgaactgaccgtaggtgatgattatactgcaggcgattttttcgatagtgtcagctttcgtggtgtgcagctggcgagtgatgacaacatgctgccagacagcctgaaagggtttgcgcctgtggtgcgtggtatcgccaaaagcaatgcccagataacgattaagcaaaatggttacaccatttaccaaacttatgtaagccctggtgcttttgaaattagtgatctctattccacgagcagcagcggtgatttgttagttgaaatcaaagaagcggacggcagcgtcaatagctacagcgtaccgttctccagtgtgccattactccagcgtcaggggcgaatcaaatacgcggtgacactggcgaaatacagaaccaatagtaatgaacagcaggagagcaaatttgcccaggccacgttgcagtggggcggaccgtggggaacgacctggtatggtggtggacaatatgctgaatattaccgtgccgccatgtttggtctgggatttaacctcggcgatttcggagcaattagcttcgatgcgacccaggcgaagagtacgctagcagatcaaagcgaacataaaggtcagagttatcgttttctgtatgccaaaacgctcaaccacttgggcactaactttcaattgatgggctatcgctatagcacgagcggtttctacaccctttccgacaccatgtataaacatatggatggctacgaatttaatgacggtgatgatgaagatacgccgatgtggagccgttattacaatttgttttacaccaaacgtggcaaactgcaggtcaatatctcccagcaattaggcgagtacggtagcttttatttaagtggtagccagcaaacttactggcatacggatcaacaggatcggctattacagtttggctacaacacgcaaattaaagatcttagcctggggatttcctggaactacagtaagtcccgtggtcaacctgatgctgatcaggtgtttgctctaaatttttccctgccgctcaatctgttgctccccagaagtaatgatagctataccaggaaaaaaaattacgcctggatgacctctaacaccagtatcgataacgaagggcacactacacaaaacctgggtttaacggagacattactcgatgacggtaacctgagctacagcgtgcaacagggatataacagcgaggggaaaacggctaatggtagcgccagcatggattacaaaggggcgtttgcggatgcccgagtgggctacaactacagcgataacggcagtcaacaacaactgaactacgctcttagtggcagtttagttgcccatagtcagggcattaccctggggcaaagcctgggggaaactaacgttctgattgcagcaccaggcgcagagaatactcgtgtggcgaacagcaccgggctgaaaactgactggcgcggatataccgttgttccttatgccacttcttatcgggaaaatcgaatcgcacttgatgcggcgagcttaaaacgtaacgtggatcttgaaaatgcagtagtcaacgtggttcccaccaaaggggcgttggttctggcggagttcaatgcccatgcgggtgcaagggtattaatgaaaacaagtaagcagggtataccgctgcgttttggcgcgatagcgacgctggacggcgtacaggctaatagcggcataattgatgatgatggcagcctctatatggcgggtttaccggcgaagggaacaataagcgtgcgctggggcgaagctcccgatcaaatttgtcatatcaattacgagcttaccgaacaacaaattaactctgcgattacgcgaatggatgccatatgcagataatctttggagaaaaatgcgtgagtttactacgactattttttgccgccgtcttaatgttatggtgcgctcaaaccgctgcttatagcgggcagtgtcatactactcaggggaatccgtatattggcgtcaattttggcgttaaaaccctggaggaagaagcaaatacggcaggggtagttaaagacaaattttatcagtggaacgaaagcaatgattattatgtttcctgtgattgcgataaagacaatgtcagaagtggccgatgggcattcgccgcggatagtccgttagtctatttaggcgacaactggtacaaaattaatgactatcttgccgccaaagttttattgcaggttaaaggcagttctcctactgcggttcctttcgaaaacgtgggcacagggggggatacccgatggcatatttgcgaccctggcggtcaacgtttaggtgggcagggggcaagcggtaatagcggtagcttttccctgaaaatattgcagccgttcgttggcagcgtcgtcattcctcctatggcgctggcgcgattatatgaatgctacaacatacccgcaggtgattcctgcacgactacaggtacaccggttttagtgtattacctgtctggtacgatcaatagtcttggcagttgttccgtcaatgccggagagacaattgaagttgatttaggtgatgtcttcgctgccaatttccgtgttgtagggcataaacctcttggggccagaacggcagaacttgcaattccagtcaggtgtaacacgggaaacgcgggattagttaatgtcaacctgagtctgacggcaaccacagaccccagctatccccaggcgattaagacgagtcgtcctggcgtgggcgtggtggtgaccgatagccagaacaacattatttcccctgctggtggaacattaccgctctctattcctgatgatgcagacagtatcgcgcgaatgaatgtctatccagtcagcacgacaggtgtaccaccagaaaccgggcgatttgaagccacggcaacggtgagaataaattttgattaacgcgtgaacgtatgaagaaaaaaacgatatttcagtgcgttatcttgttctttagcattcttaacatccatgtcgggatggctgggcctgaacaagttagtatgcatatttatgggaatgtggtcgatcagggctgtgatgtcgccaccaaaagtgcattacaaaatattcatattggtgattttaatatcagtgattttcaggccgcgaataccgtaagcactgctgctgatttgaatatcgatatcaccggttgtgccgctggtattactggcgcggacgtcctttttagcggcgaggctgacacccttgcgccgacactgctcaaactaactgacacaggcggaagcggtggtatggcaacggggattgccgtgcaaattcttgatgcgcaaagtcagcaagaaatcccgctcaatcaggtccagcctcttacgcccttaaaagccggggataacacactcaaatatcaacttcgttataagtccacaaaggcgggagcaacgggcggtaatgcgacggcggttctctattttgatctggtttaccagtgaaggagtgatgttgaaacggataatctggattctgttcttattgggattaacgtggggctgtgagctatttgcccatgatggcacggtcaacattagcggaagctttcgccgtaatacatgcgtgctggcacaggatagcaagcaaatcaatgtgcagttaggcgatgtcagcctgacacgtttttctcatgggaattatggcccggagaaatctttcatcattaatttgcaggattgcggaacagatgtcagcacggttgacgtcacctttagtggaacccccgacggagtgcagagcgaaatgttgtccattgaaagtggtacggatgcagccagcgggctggcaattgcgattctggatgatgcgaagatattgattccgcttaaccaggcgagtaaagactacagcctacatagcggtaaggtgccattaactttttatgcgcaattgcgacctgtcaatagcgatgtgcagagcggtaaagtgaatgccagcgcgacatttgtacttcattatgactaatacgtggaacagattggcgctcttgattttcgccgttttaagcctgctggtggcgggtgaattgcaggcaggagtggtggtcggcggaacgcgatttatctttccggcagacagagaaagcatatctattttactgactaataccagtcaggaatcctggcttattaacagtaaaatcaaccgcccaacgcgttgggccgggggggaagcgagcacagtgccagcaccattactggccgctccgccacttattctcctgaagcccggtacgacaggcacgttgcgcttgctgagaacggaaagcgacatcttgcctgtggatcgcgaaacgctatttgagttaagcattgccagcgtgccatccggcaaagttgaaaatcagagcgtaaaagtggcgatgcgcagcgtatttaaactgttctggcgacccgaaggtttgccgggcgacccgctggaagcttatcaacaattacgctggacacggaatagccagggtgtacaactcactaacccaacgccttattacattaacctgattcaggtgagtgtaaatggtaaagcgttaagtaatgtgggagttgtgccgcctaaaagccagcgtcagacaagctggtgtcaggcaatcgcaccgtgtcatgtcgcctggcgggcgataaatgattacggcgggttgagtgcaaagaaggagcaaaatctgccctgaaacaggttcggaaaacgtttgcgttttttttgccgcaggtcaattcccttttggtccgaactcgcacataatacgcccccggtttgcacaccgggaatccaggagagttcatgtactaccccttcgttcgtaaagcccttttccagctcgatccagagcgcgctcatgagtttacttttcagcaattacgccgtattacaggaacgccgtttgaagcactggtgcggcagaaagtgcctgcgaaacctgttaactgcatgggcctgacgtttaaaaatccgcttggtctggcagccggtcttgataaagacggggagtgcattgacgcgttaggcgcgatgggatttggaagcatcgagatcggtaccgtcacgccacgtccacagccaggtaatgacaagccgcgtctctttcgtctggtagatgccgaaggtttgatcaaccgtatgggctttaataatcttggcgttgataacctcgtagagaacgtaaaaaaggcccattatgacggcgtcctgggtattaacatcggcaaaaataaagatacgccagtggagcagggcaaagatgactatctgatttgtatggaaaaaatctatgcctatgcgggatatatcgccatcaatattagtagcccgaataccccaggattacgcacgctgcaatatggtgaagcgctggatgatctcttaaccgcgattaaaaataagcaaaatgatttgcaagcgatgcaccataaatatgtgccgatcgcagtgaagatcgcgccggatctttctgaagaagaattgatccaggttgccgatagtttagttcgccataatattgatggcgttattgcaaccaataccacactcgatcgttctcttgttcagggaatgaaaaattgcgatcaaaccggtggcttaagtggtcgtccgcttcagttaaaaagcaccgaaattattcgccgcttgagtctggaattaaacggtcgcttaccgatcatcggtgttggcggcatcgacagcgttatcgctgcgcgtgaaaagattgctgcgggtgccagtctggtgcaaatttattctggttttatttttaaaggtccgccgctgattaaagaaatcgttacccatatctaattatttcttcgaattcctctttataagataatcagggctttattttcagccctggttgttttatattcatcgctgttgcttatttagacattttgtacttttattgttgaggttattaagcgaagcgacaatggattgtgttgctgcggttttatagggtaggggagaggcagatgcgaattaaaccagacgataactggcgttggtattacgatgaagagcacgatcgaatgatgctcgatttagccaatggtatgctatttcgcagtcgttttgcgcgcaagatgttgactccagatgccttttctcccgcaggcttttgcgttgacgacgccgcgctctatttctcttttgaagaaaagtgccgcgattttaatttatctaaagaacaaaaagccgaactggtgctgaatgcactggtagcaattcgctatctcaaaccgcaaatgccgaaaagctggcattttgtttcccatggtgaaatgtgggtgcccatgccgggcgatgcggcctgcgtttggttgagcgatactcacgagcaggtcaatttgctggtcgttgaatctggcgaaaatgccgcactatgcctgctggcacaaccctgcgttgttattgcgggtcgcgcgatgcagttgggcgacgccattaaaatcatgaacgacaggctgaaaccgcaggttaatgttgacagcttcagcctcgaacaggcagtttaacgcgccaacttaagtgcagtcttcggtacacagctacagcaaagaatggtgccatcatcgcccattgcactttttttcagcggcgtgacttcgccttctaaaagctgaacacggcaacttccacaaatgcccgcgcggcaagaataagggatacgaattccctgattttctaattgctccagcaacacctgttggttatttccacgaaatgcctgtccctgccagtcaatatctacatttgcgtccggttgttgcgtgatgttggcggtatcatcagcggcagctgcgccgtaaatttttgccggagccgttgccagaatttccacctcatcgccaacgcgaatcacgccgctattacgggcaattaaattctgaccaaaatcgacatcgccgttatcctgggcagtgcggaaagattgcaatgtttttaatggttcgcctgccggatgtttttgccctttttctgggctgacggtggtgaaaatacagcggctacaaggtttaaccacatcaaacaccacatcaccaatgcgaatcactttccagcgatcttcttcccaggcactcgcgccggaaaccaccagattggggcggaattgctccatttttacactggccggacaacgttgttggagatcacgtaagctggcttcgttagcaagaaggtaaggatagccatcagcaaaactcagaggtacagtgttgtggcgtttcacgcgccgggtcatttgtggccccacccagcgtaattgcacttcgcgggagaaaaatccacttagccatttgttgatcgcgtctggcgcaattcgcgcggtaaaatgtgtgccccaaacttcggttggtgcgtcttgtgtggcgaaatcagcaaaacgaacatatgcgctactgccatctggtgcggtgagatgcaagccatcatgcacaggactaggagtaaaccgtaccatctggggaaactggcgagcggtaataaacgtaccgtcaggttccgtgatcataaagatgcgatcgaaggccagaccactgacatctgccagagcatgtgtaagaccaatgccgcgcatgcttttaacaggatgaataaaaagccggattaatgtcgccacggtgcggtcctcaaatgaaaataagccctcaactttatgacatgacgcgcttattagctataatgcgcaacaattttcttagcgcctgtcccattaggctattttatttgtcagtttggccctgggttatgctcgaaatcctcacgtacttgtgtacgctccggtttctccgcgctgtccatgtccagactgactgcaacaattacgcctactgcggtaggctcttagagtaaaagtgacgatatgaattctctgtttgccagtacggcccgtgggctggaagagctgttaaaaactgaactggaaaacctgggggccgttgaatgccaggtggttcagggtggggtccatttcaagggcgacacacggcttgtttaccagagcctgatgtggagccgcctggccagccgtattatgttgccgctgggcgagtgtaaggtttacagcgatttagacctctatctcggtgttcaggcgatcaactggacagagatgtttaatcctggcgcgaccttcgctgtccacttcagtggtttgaatgacaccatccgcaacagtcagtacggcgcgatgaaagtgaaagacgcgatcgtcgatgctttcacgcggaaaaatctgccgcgtccaaatgttgatcgcgatgcgccggatatccgcgttaacgtctggctgcataaagaaaccgccagtatcgctcttgatctgagtggtgatggtttacatctgcgtggctatcgcgatcgtgctggtattgcgccgatcaaagaaaccctggcagccgctattgtgatgcgatccggctggcagccaggaacaccgctgctcgatccgatgtgtggttccggtacgttgctgattgaagcagcgatgctggcgaccgatcgcgcaccaggcttgcaccgtgggcgttggggctttagcggctgggcgcagcatgatgaagctatctggcaggaagtgaaagcggaagcgcaaactcgcgcccgtaaaggcctggctgagtatagctctcatttttacggtagcgacagcgacgcacgggtgattcaacgtgcacgcactaacgcccgtcttgcggggattggtgaactgatcacctttgaggtgaaagatgtcgcgcaactgaccaatccgctgccgaaagggccgtacggcacagtgttgagcaacccgccatacggggaacgtctggacagcgaaccggcgctgattgcgctgcatagcctgctgggtcggatcatgaaaaaccagtttggtggctggaatctctctttgtttagtgccagcccggatctgctaagctgcttgcagctgcgtgcagacaaacagtacaaggcgaaaaacggcccgctggactgcgtacagaaaaattaccacgttgccgaaagcactccagacagcaaaccggcgatggtagcggaagactacaccaaccgcctgcgtaagaacctcaaaaaattcgagaagtgggctcgccaggaagggattgaatgttaccgcctgtatgacgccgatctgccagaatataacgttgccgttgaccgttatgccgactgggtggtggtgcaggagtatgcgccgccaaaaactattgatgctcacaaagcgcgtcagcgtctgttcgatattatcgctgcaaccattagcgtactggggattgcgccaaacaaactggtgctgaaaacccgtgaacgccagaagggcaaaaaccaataccagaaactgggcgagaagggcgagtttcttgaagttaccgaatataacgctcacttgtgggtgaacctgacggattatctcgatactggtctgttcctcgatcaccgcatcgcccgtcgtatgctcggtcagatgagcaaaggcaaagatttcctcaacctgttctcttataccggcagcgccaccgtgcatgcgggattaggcggtgcacgcagcaccaccaccgtggatatgagccgtacttatctggaatgggcagaacgcaacctgcgtctgaatggcctgaccgggcgtgcgcatcgcctgattcaggccgattgcctggcgtggctgcgtgaggcaaatgaacagttcgatctgatctttatcgatccgccaaccttctctaacagtaaacgaatggaagatgcgtttgatgttcagcgcgatcatctggcgctgatgaaagatttgaaacgtctgctgcgtgcaggtgggacgatcatgttcagcaacaacaaacgtggcttccgtatggatctcgacggcctggcaaaactgggactgaaagcacaagaaattacgcaaaaaacgctctcccaggatttcgcccgtaaccgccagatccacaactgctggctgattaccgcagcctgaaaggaatagtaatgagtttaatcagtatgcatggcgcatggctgagcttcagcgacgcgccgcttctcgataacgcagaactgcatatcgaagataacgaacgtgtttgtctggtgggccgcaacggcgcaggcaaaagcacgttaatgaaaatcctcaaccgtgaacaagggctggatgacggtcgcattatttacgagcaagatttgattgtagcgcgtctgcaacaggatccgccgcgtaacgttgagggtagcgtttatgatttcgttgccgaaggcattgaagaacaagcggaatatctgaaacgctatcacgatattagccgcctggtgatgaacgacccgagcgagaaaaatctcaacgaactggcgaaggttcaggaacagctggatcaccacaacctgtggcagctggaaaaccgcatcaacgaagtgctggcgcaactggggttagatcctaacgttgcgctgagcagcctttccggcggctggttgcgtaaagcggcattaggacgcgcgctggtgagtaatccgcgcgtgctgttgcttgatgaaccgacaaaccacctggatattgaaaccatcgactggctggaagggtttttgaaaactttcaacgggacgattattttcatctcccacgaccgtagctttatccgcaatatggcgacgcgcattgttgatctcgatcgcggcaagctggtgacctatccagggaattacgaccagtacctgctggaaaaagaagaagccctgcgcgtggaagaattacaaaatgccgagttcgatcgcaaactggcgcaggaagaggtgtggatccgccaggggatcaaagcacgccgtacccgtaatgaaggccgcgtacgcgccctgaaagcgatgcgtcgcgaacgtggtgaacgtcgcgaagtgatgggtaccgcaaagatgcaggtggaagaggccagccgctccggtaaaatcgttttcgaaatggaagacgtttgctaccaggttaacggtaagcaactggtgaaagatttttctgcccaggttctacgtggcgacaaaattgccctgattggtccgaatgggtgcggcaaaaccacgctgctaaaactgatgctcggtcagcttcaagtggacagcgggcgtattcacgttggcaccaaactggaagtggcttatttcgatcagcaccgcgcggaactggatcccgataaaacggtgatggataaccttgccgaaggtaagcaagaggtgatggttaacggcaagccacgccacgtattgggctatttgcaggactttctgttccatccgaaacgggcgatgacgccggtacgtgcgctttctggcggtgagcggaaccgcttgctgctggcgcgtttgttcctcaaaccaagcaacttattgattcttgacgaaccgaccaacgatcttgatgtcgaaacgctggaactgctggaagaactgatcgacagctatcagggcacggtattgctggttagccacgatcgtcagtttgtcgataacaccgttacagaatgttggatcttcgaaggcggcggtaaaattggtcgttatgtcggcggttatcatgatgcccgtggtcagcaagagcagtatgtggcgctcaaacagcctgcggtgaaaaaaaccgaagaagccgccgcggcaaaagcagaaactgtaaaacgcagcagtagcaaactaagctataaattgcagcgcgaactggagcagctaccgcaattgctcgaagatctggaggcgaagctggaagccctacagacgcaagtggcggatgcttccttcttcagtcagccgcatgagcagacgcaaaaagtgcttgctgatatggctgctgcagagcaggagctggagcaagcctttgaacgctgggagtatcttgaagcgttaaaaaatggtggctgatcgcaaaatagtcgatttaaacagagacagctgacaacggtaaaattgcctgatgaactgggtttatcaggcatgaaaaccaacactttgttagtcatctgtaaaatagcgcatcattaaggagtaccaatgtgcgaacatcatcatgccgcgaagcacatcctgtgcagccagtgtgacatgctggtggcgttaccgcgccttgagcatggtcagaaagcggcatgtccccggtgtggcacaacgttaaccgtggcgtgggatgcccctcggcagcgtcccaccgcctatgcgttggctgcactgttcatgctgttgctgtccaacttgtttccttttgtgaatatgaacgttgcaggagttaccagtgaaattacattactggaaattcccggcgtgcttttttctgaggactacgccagcctcggcacctttttcctgttgtttgtgcaactggttcccgcgttttgtctgataaccattctgttactggtgaatcgcgcggaattaccggtccgtttaaaagagcaactggcacgggtgctttttcaactcaaaacctggggaatggcggagattttcctcgcgggtgtgctggtcagtttcgttaaactgatggcttacggcagcattggggtaggcagcagctttctcccctggtgtttattttgtgtcctgcaactgcgcgcttttcagtgcgttgatcgtcgctggttatgggacgacatcgccccgatgccagaactgcgccagccgctaaaaccaggcgtcacggggatacgtcaggggctgcgtagctgctcctgttgtacggcaatccttcctgctgatgaacccgtgtgcccgcgttgtagtaccaaagggtacgttcggcgtagaaacagcctgcagtggacactcgcgctgcttgtaacgtccatcatgctgtatcttccggctaatattttgcccatcatggtgacggatttattaggcagcaagatgccgagcacgattctcgctggggtcattctgttatggagcgaaggctcttatcccgtcgctgcggtgatctttctggccagtattatggtgccaacgttaaagatgatcgccatcgcgtggctgtgttgggatgccaaagggcatggcaagcgcgacagtgaaagaatgcatttgatttatgaagttgttgagtttgtaggccgctggagcatgattgacgttttcgttatcgcggtgctcagcgcgctggtgcgtatgggaggtttaatgagtatttatccggcaatgggtgcattaatgtttgctttagtcgtcataatgacaatgttttctgctatgacgtttgacccgcgtttgagctgggatcgtcaacctgaaagtgagcatgaggagtcctgacagtatggaatctaataatggggaagccaaaatccagaaagtgaagaactggtctcccgtgtggatatttcctatcgtcacggcgctcattggggcctgggttcttttttatcattacagccatcagggaccggaagtgaccctgatcaccgcgaatgcggaaggaattgaaggtggcaaaaccaccattaaaagccgtagcgttgacgtcggcgtggttgaaagcgccacactggctgatgatttgacgcacgttgaaatcaaagcgcggctgaattccggtatggaaaaattgctgcataaagacaccgtcttttgggtggtgaaaccgcagattggtcgcgaagggattagcggcctgggaacgctgctgtctggagtttatatcgaactgcagccaggcgcgaaaggcagcaaaatggataaatacgatttgctggacagcccaccgttggccccgcctgatgcgaaaggtatccgtgtgattctcgatagcaaaaaagccgggcagctcagcccaggagatccggtgctgttccgtggctatcgggtaggtagcgttgaaaccagcaccttcgatacacaaaaacgcaatatcagctatcaactgttcatcaatgcaccttatgaccgactggtgaccaacaatgttcgcttctggaaagatagtggcattgcggttgatctgacgagtgcagggatgcgtgtggagatgggcagtttgacaacgctgctgagtggcggtgtcagctttgatgtgccggaaggtctggatttagggcagccagtggcaccgaaaacagctttcgttttgtatgatgatcagaagagcattcaggatagcttgtacaccgatcacattgattatctgatgttctttaaagatagcgtacgcggtctgcaaccgggagctccggtagagttccggggtattcgcctgggtaccgtaagcaaagtgccattctttgcgccgaatatgcgtcagacatttaacgatgattaccgtattccggtactgattcgtatcgagccagagcggctgaaaatgcagcttggcgaaaatgcggatgttgttgagcaccttggcgaattgttgaaacgtggtttacgcggaagcctgaaaaccggaaacctggtcactggtgcactgtatgttgatctcgatttctatccaaatacgcctgcaataaccggtattcgtgaatttaatggttatcagattatcccgaccgttagcggcggcctggcgcaaatccagcaacgactgatggaagcgttggataagatcaacaaactgccattgaatccgatgattgaacaggcaaccagtacgctttctgaaagtcagcgcacaatgaaaaacctgcaaacgacgctggatagcatgaacaagatcctcgctagccagagcatgcagcagttgccgacggatatgcagagtacgttgcgtgaattgaatcgcagcatgcagggcttccagcctggctccgcagcctacaacaagatggtggcggatatgcagcgccttgatcaggtgttgcgagaactgcaaccggtgctgaaaacgttcaatgagaagagtaacgcgctggtatttgaagcgaaggacaaaaaagatccagagccgaagagggcgaaacaatgaaaaagtggctagtgacgattgcagcactgtggctggccggatgcagctccggcgaaattaataaaaactattaccagttacctgtggtgcagagcggtacacaaagtaccgccagccagggcaatcgtctgttatgggtagagcaggtcactgttcctgactatctggcggggaatggtgtggtttatcaaaccagtgatgtgaagtatgtgattgccaacaacaacttgtgggccagcccgttggatcaacagttgcgcaacaccctggttgccaacctgagtacgcaactgcccggctgggtggttgcctcccagcctctgggaagcgcccaggacacgctcaatgttaccgtaacggagtttaacggtcgctatgatggcaaggtcattgtcagtggtgagtggctgttgaaccaccagggacaactgatcaaacgtccgttccgtctggaaggagtgcaaactcaggatggttacgatgagatggttaaagtgctggccggtgtctggagtcaggaagccgcttctattgcacaagagataaagcgtctaccttaattataaagatttgtaaatataaccgtctccggtatgttgcctgaggcggtttttttgtctctaacgtgcggaaaaatttgttcctcttcacattttttgtacaaccgacatgcccgtgtagctcacaaatatgacagtggcgtgaattttgcgcattgacggcagttatgattcgcggtattgcttaactgtgattgcacatttagtaatcactgttttcttttccaccagaaaccagtatgagggaaacgaggcatgaagagacaaaaacgagatcgcctggaacgggcacatcaacgtggttatcaggccggcatcgccggacgcagtaaagaaatgtgtccctatcagacgctgaatcaaaggagtcaatggctgggaggctggcgagaagccatggcggacagggtagtaatggcctgattctgtctctttaaaaagaaacctccgcattgcggaggtttcgccttttgatactctgtctgattataatcagaaggcagacgtatcctggaacagaccgactttcaggtcgctggcggtatagatcagacgaccatcaaccagcacttcgccatccgccaggcccataatcagacgacggttaacaatgcgtttaaagtgaatacggtaggtcacttttttcgctgtcggcagtacctgaccagtgaatttcacttcgccaacgcccagcgcgcggcctttaccttcgccgcccagccagccgaggtagaaccctaccagctgccacattgcgtccaggcccaggcatcccggcataaccggatcgccaataaagtggcatccgaagaaccacagatccggattgatatccagttctgcttcaacataccctttgtcgaagttaccacccgtttcggtcattttgaccacacggtccatcatcagcatgttcggtgctggcaattgcgggcctttagcgccaaacagttcaccgcgaccagaggcaagaaggtcttcttttgtataggattcgcgtttatctaccatgttctctgtaagccttattttattgaagcacgcaggatagctaacacgtgtacgctgaacaagtccgatcagttcggaataaaccagttcagccaacgtaatggccatggaaaacggtgacgtccttcctgttggcttgcttgcgcgatacgttcctggatggtttgcatcagcgtcgtttggccttcgccatcccacaccagatttaataataacggcagtgcgtcagtcacatcgtctactgcccagatggtgaatttgccttcttctaccgctttcaccagttcactgtgaagacttaaatggcgaacgttagctgtggggataatgacaccttgtttcccggttaactcacgttgctggcaaatagcaaagaagccttcgattttctcatttaaaccaccgaccggctgggcgcgaccgaactgatcgacactacctgtgatagcgatactctgattcaccggcacatcggcgagggcgcttatcagggcgcagagttcagccatgctggcactatctccatcaacttcactgtaactctgctcaaatgtcaggcttgcactgaaggggatctgttgctcaagctgtagttcgctcatcaggaacgcttgcatgatcatcatccctttcgcatggatattgccgccaagctccgctttgcgttcgatgtcggtgaattcaccatcgccaatatgcacaacgcagctaatgcgagaaggttcgccaaaagcgcgtggatgacccggaaattcaatgacgctaagggcgttaatttgcccgatgcgttcgccttcggtttcaatcaggatttgctcctgaaggatctcatcctgcatacgttcagcgaggaaaccttcgcgccattcacgctgctgcagcattaagtttagctgctcgccggagaaggtgtcgccatcacacagggaggcgacctctttacactggcggaggatccactgcgggctaagcggaagtgtttcttgttcaccggtgtagcgtgctgcttcgcggataagtatcggccaggcatccgctcccggtgcaggtaagtgattatgtctggcggtaaatgtcacccagcgacaccactgggttacactctccgcatcgacaatctgcagagtatcttcaaattcgctataaatagcctgctcactaagctctggctccatctcctggaaatcagccaaactttcgcgttcgcctaccagaatgactttcagcttcaatggcatgctaggcacagagacggggagagggcggctctcatcaaacgcaacccagtcaaaacgctcgcggttaacgatatttttcagccgcatccacagcagaggttgcgccagcagtgtacgcaaagagataatgagaataccgccatttgcctgatgcaccagaccaggctgcagggtaatgtcgccattaaactggcgcaggcagccaaagagttgctccgcttctacccagtcggcagcgacaacttgcgttaaagtcgcaaaattatcatctgcactcactgcgtgacgtaagcggatggagtggccggaaacctcatagtgaccgcccaccagttggcctgcatcgctttgtagcgtacgcgcggcattggcaataagattcagatactcagactcttccggggccttcgccagcataaaagaggaggatgctcgcgtatgcagcaactgctccagcgcaaattgcagccgcggttgagtatcactgaataaaggatcgttttcgtcaatcaaatgtggctgagcaaatatttcctgatagctatcggtatcaggaaccaggtcacgccatgcaagtttcgtaatggtcaaagttgatgttttttagtctgttgtcaaagccgcgattataccgtaaccggcactacagcacacgtagaaagcaccgacaatactcctggcatgggcgttaaagctcacaggatggagattcttttcttcactggcctaaaaagctgatattctgtaaagagttacacggtaacattgagatcgctatgaaatatcaacaacttgaaaatcttgaaagcggttggaaatggaagtatctggttaagaagcatcgcgaaggggagttaatcacccgttacatagaagccagtgccgcccaggaagccgtcgatgtgttgctcagcctggaaaatgaacccgtgctggtaaatggctggattgacaagcatatgaatccggaactggtcaatcgcatgaagcaaaccattcgggcaagacgaaagcgccattttaatgcggaacaccagcatacgcgcaaaaaaaagcatcgatctggaatttattgtctggcaacgtctggctggtcttgcgcagcgtcgcggtaaaacgctttctgaaacgattgttcagctgattgaagatgcggaaaacaaagagaaatacgcgaataaaatgtcttctctgaagcaggatctgcaggcattgctgggtaaggaataactgacgaaagtcagttcaatttactaaaggcaaaaaaaaccccgcagcagcggggtttttctaccagacgagaacttaagcctgcggctgagttacaacgtctttgatacctttaacttcgatctctacgcgacgatccggagccaggcagtcgatcagtgcagcacgctgtttcacgttgtcacaggtgttgccagtaaccgggttggattcgcccataccacgtgcggagatcttgtctgccgggatacctttggagatcaggtaatcaacaacagactgagcacggcgctcggacagaccctggttgtaagcgtcagaaccgatgcggtcggtgtaacccagaacaactacggaaccgtctttcggatccaggttgctcagctggctgtacagctgatccagagcagcctgaccttccggtttcagggttgctttgttgaagttgaacagaacgtcagacttcagagtgaagtgcttggtctgtacttccggtgccggagctggagccggagcaactactggagctgcttcgccctgaccgaaacggtaggaaacacccaggctcagcatgccgttgtccggacgagtgccgatggtgtgtgcgtcaccgatgttgttggtccactggtattccagacgggtagcgatttcaggagtgatcgcgtactcaacaccgccagcgaagaccggagaaacgccggtgtcgtggtttttaccataaacgttggatttagtgtctgcacgccataccatgccacccagacgagtgtagatgtccaggtcgtcagtgattgggtaacccagtttagcggtcagttgaacgccctgagctttgtatgcaccgttttcaacgctgcctttgtacggcatacgacctaaccagtcgtaacccatttcaaagccaacatacgggttaacctggtaaccaccaaaagcaccagcgcccagttggttttcatgggtcgggccattgttgttgatgaaaccagtgtcatggtactgggaccagcccagtttagcaccagtgtaccaggtgttatctttcggagcggcctgcgctacggtagcgaaaccagccagtgccactgcaatcgcgatagctgtctttttcattttttgcgcctcgttatcatccaaaatacgccatgaatatctccaacgagataacacggttaaatccttcaccgggggatctgctcaatattaactctaccgatatcttcggcttatgccgagcacccctggcgatgtaaagtctacaacgtagttgaaaacttacaagtgtgaactccgtcaggcatatgaaaaaaaagtcttgtataaggtatgtttaatcttttttgtcagcgacaatttacagaagagaatcgcggaaaccgcttcagacaagcctccgcaaggaaaattagtcacgactgaaagcattggctgggcgacaaaaaaagttccaggattaatcctaaatttacttaatgatacaaattagagtgaatttttagcccggaaagttgtctcgtggcgtgagaggatgcgcttaccggacgcataataaaccccatagcgttaccttcatttgccgcatcaacaagttcagcatgctcttcttcagtcaaatcatctgccaaccaaccgatcaccacactgtaattgcccgtgcgtaaagcgcgaaccatactctccacagtgtggcaaggggagagctggctaatctgcattactttcgttaagggtagcccagatgcctgaacccattcccgactcagtttttgttgcggtgttaaccagagttgccagcggctttgctgaccgagttgctgtaacaatggcaacagtagaagttgcgtcatcatgggctgatcttcgcgatagacaacttcactgataagcccggctgtagtgttttccgtagagacacgcgcaattttacttgctgcggaactgaagctgctagaacgatgtgcatagccactagtgtacataatcaatccagcccctgtgagttactgtatggatgtacagtacatccagtgacaacaaagatcaaccctattttcggaaagagcctcgcaaattttgtcgttggtgacgggaaaacataaattaatcttgccccttaagaataagttgcctattttcgtagttaacggatccgttaatgtgaatcattcttttatgttatgattttaaaaggaattttatgaaaagcctctcctataagcggatctataaaagtcaagaatacctggcaacgttgggcacaattgaataccgaagtttgtttggcagttacagcctgaccgttgacgacacggtgtttgcgatggtttctgatggtgagttgtatcttcgggcttgtgagcaaagtgcacagtactgtgtaaaacatccgcctgtctggctgacatataaaaagtgtggccgatccgttaccctcaattactatcgggttgatgaaagtctatggcgaaatcaactgaagctggtgcgtctgagcaaatattctctcgatgcagcgctgaaagagaaaagcacgcgcaatacccgggaaagactgaaagatttgcccaatatgtcttttcatctggaagcgattctcggggaggtggggattaaggatgtacgggcgttacgtatacttggggcaaaaatgtgttggttgcgactgcggcagcaaaacagtctggtgacagaaaagattctgtttatgcttgaaggtgccattatcggcattcatgaagctgcgctcccggtggcacgccgccaggagcttgcagaatgggctgactctcttacgccgaaacaggagtttcctgcggaacttgagtaattacgcgctaacaggagtttcctgcggaacttgagtaatctggcgttgcagacgaccaatctcaggcagtaatgcaatcaataatccaacttgttgtacgaccagaggttctttgctgtctgcccgtggttcaagttgctgcatccgctgtttcaggctagctaatgcctcattgacgcgttcttcatcagcaggttgatgatgtaacgcgtcatcaacatagcaaactgcgtcatcaagaaacgccagaatttcaggattagttaactgctcccggtgagcaccgagggcactgatatagctggtaaacgtatggttaaggcacagcaaccgaaacgcggcttcgcgaatttgcggggtaacgttcggctcgctggacatattacttaccacgctcgccagctcagcatcacggttgtgtgcatcgcggcgggcaatacgatacgccagacggttatcacgcccctgatggtattgctccagtatggcatcgagataccgacagttggcctctgtggcacgttcgagcatgcgcggcagattgcgaaactgccagtcaggccagatgtagctcactgccgcccacgcaatggcacaaccaatcagcgtatcgattacgcgaggtaacgctacttcaaaaccttcacccagtaagttaaaacacagtagcaccaaaagtgtgatgaacatcgttgcatgagcgtattgcacgttacggaaggcaaaaaagagcacgccggtaataaccagcagcaccagctgcccttccagacttggcacaaaccacagcacaggaatgccaatggcgatacctaccagcgtaccaataatccttaacttcaggcggtggcgcgtggcgttatagtttggctggcagacaaacaaacttgtcagcaagatccaatacccgtgatgcattccggttatctgaatgatggcgtagccgaagcacaacaccaggctcattcttaccgcatgacggaagagggcggattccggcgtgaagtgacggctaagacgcagccagatatcactcaacccgtgcgggctgtcatcagcgagctcattttcgtcattattatggggtagtgcctgggcctgttcactttcaattgttgccagttgggcatcaatggcgcgtaaattgttcagcaaaaatcccagtgttttgagtaaatcggcgggtgcgccgttatcgcgcatccgctccagcgcagcatcaatatgcgtaaaagcgcgctcaaaatgcggatcatgttgataaggctgacgcaacaaaatacagcgactcagttgctggcacgcctggccctgcatgctcatcagccgctgaaaacggaacagcacgtcgctgtggcgaaaatgttcacgcaatgtttgatactgaatatgagaagagctggcacgctcgtgaatatcctgtgcgacaaagtaataatgcagcgtgcgacgcgttccccgttgaccacgatcgccacgtaagcgggtcagcaggctgagtttcgtctgattcaatgtcgccatcagcagaccgttggcgagagccaaatcgtacagcggtgcctggctttgatcttcaatatcaggatcaaacatgcggctcttgagctcaagataacgcgccagttgttcatagcaacgcgccaggttgtcctgcagcgggcggaccgggaacagcagatgaccaataagtgtcaggacgttgtaccagacggcaccggccagcagatacatcggctgctgataccagtgctcatacagacttgttcccaacatagtgtaaatggcgatcagcaatgcaccgaaggcaattgttgcatagcgttgacccagaccgccgagcaaaatgaagccgctggtagagagcgttaagccaatcgcaaatagccagggccagggaaacagcaattctacactggcgctggcgataaaaaagcagaacagcgtaatgatgaggttacgcaaacgtcccgccagtcggtcatcgagatcggtcagcgccgctgccaccatccccagcgttagcggaatcgtcagttttacatcacccagccaccacggaaacgctgtggttccacaaagcgcaataaaaatacgcgcgtaatacagccaggcgctgttccaggtatagcgtttgagcaaaggacttagcataaaggccatattagtggattattcaaaacgacgacgtgcattggcttcacgcgcagcttgcgctgtttctacgcttaccacgcgacgaccaaccggccatagtgcaatagcggcaattttaaagttcgcaatgccgacaggaatgccaatgatactaatacattgtgcgatgcccgttgcaatgtgcatcaggcataaccaccagccaaagaaaatcagccagaaaatattcaataccgtaccgccagtattcagcagcacatttttgccagccgggttcagttcatcgacatgaatagcttcattgccataaggcaccagagacagtttagtgatctcccagcaggatcgtgtcagcggtaaggtaaaaatcagcacaatactgaccagagtcgccaacagccagcccagagtggtggcaaatccgccaagcacaaagttcagaatgttcaaaacggtacgcataaaacctcgctttactgtggttttcagtaatgggcggcaattgtaacgtttttttgggctggagcacgttttctctgacggttacactgataagaaataatttcgtgtggatctacagagtcatggaactgaaagcgacaacgcttggaaaacgtctggcacagcacccttacgatcgggcggtgatcctcaatgccgggattaaagtctccggcgatcgccacgaataccttattcctttcaatcaattactggcgattcactgtaagcgcggtctggtatggggcgagctggaatttgtactgccggacgaaaaagtggtgcgtctgcacggcaccgaatggggcgagacgcagcgtttttaccatcatcttgatgctcactggcggcggtggagtggcgagatgagcgaaattgcgtctggtgttttacgccagcaactggatttgattgccacgcgcactggggaaaataaatggctgacgcgtgagcaaacctctggcgtgcagcaacaaatccgccaggctttgagcgcgttgccgttgccggttaaccgactggaagaattcgataactgccgtgaggcgtggcgtaaatgtcaggcctggttgaaagatattgaaagcgctcggttgcagcataaccaggcgtataccgaagccatgcttaccgagtatgcggattttttccgccaggtcgagtctagtccgctgaatccggcgcaggcccgggcagtcgttaatggcgagcattctctgttagtgctggcaggtgcaggaagcggaaaaacgagcgtgctggtggcccgtgcaggctggttgctggcgcgtggtgaagcgtcccctgagcaaattttattgctggcgtttggtcgcaaagccgctgaagagatggacgagcggattcgcgaacggctacataccgaagacattaccgcacgcacgtttcatgcgctggcgctgcatattattcagcagggcagcaaaaaagttccgatagtcagcaaactggaaaatgataccgctgcccgtcatgaactctttattgctgagtggcgcaagcaatgcagcgaaaagaaagcgcaggcgaagggctggcggcaatggctgacggaagaaatgcagtggagtgtgccagaaggtaacttctgggatgatgaaaaattacagcgtcgccttgcctctcgcctcgatcgctgggtaagtctgatgcggatgcacggtggtgcacaggcagaaatgattgccagtgcacccgaagagattcgcgatctgttcagtaaacgtatcaagttgatggccccgttattaaaagcctggaaaggtgcgctgaaggcagaaaacgctgtcgattttagcggccttattcatcaggcgattgtgattctggagaaaggtcgctttatcagcccgtggaagcatattctggttgatgaatttcaggatatcagcccgcagcgggcagcgttgttagcggcattacgcaagcaaaacagtcagacgacgttgttcgctgttggtgatgactggcaggcgatttaccgattcagcggtgcgcaaatgagcctcaccaccgctttccatgaaaactttggtgaaggcgaacgctgtgatttagacacgacttaccgttttaacagtcgtatcggtgaggtggcaaaccggtttattcagcagaacccaggccagctgaaaaagccgctaaacagcttaaccaatggagacaaaaaagccgtcacgttattggatgagagtcaacttgacgctttgctggataagctctctggttatgccaaaccggaagagcgcattctgatcctggcgcgttaccatcacatgaggcctgccagcctggaaaaagcggcaacacgctggccgaagttgcaaatcgactttatgaccattcatgccagcaaagggcaacaggcggattacgtcatcatcgttggcttgcaggagggaagtgatggttttccggctgcggcgcgggagagcattatggaagaggcgctactgccaccggttgaggatttcccggacgctgaagaacggcggttaatgtacgtggcgctgacccgggcacgccatcgggtatgggcactgtttaacaaagagaatccctctccctttgtggaaatactgaaaaatctggatgtgccggtggcgagaaaaccgtaagaaacaggtggcgtttgccacctgtgcaatattacttcagacggtccgcgagataacgctgataatcggggatcagaatatcgaccgcgtcgttgaaatgcgggctctggattatgaagtctgccgttgccacgttggtggcgaccggaatgttccataccgtcgccagacgcagcaaggctttcacgtcaggatcgtgcggcacggcatttagtggatcccagaagaaaatcaatacatcaattttcccttcactgatcaatgcgccaacctgctggtcaccccccattgggccactcaacatcgcgttgacgttcatgccggtcgcgcgggaaattaagttaccggtagtgcctgttgcatacagtacgtgttgttccagtaacggttgatgccgttccacccagctcatcagcatttgtttgcagtgatcgtgtgccaccagcgcaatatgtttccgcgcaggtaaagtgcgagtcgtcagttccataatgtacatccgtagttaactttcctacagattactgtaagcacttatcgctgcaagataaagaccgaaaaagcctgcgcacaggcacaaaaatctcaggaagatggttgtttttccgcccactgcaggaaagtatttcgcgtttgtgggtcagccagtttaaaccaatacttcagccgttgttctgtgagcacctgagactgcggtggaatagcatccagctcggaaacaccgctaagcagcgtactgtcatctgccatcatcgtggcaaattgcggtagactagcgcgtttcgcggatttgttatagcgttcaacctcgacctcataatcaatcgtttttgccgtactggtaatggcgagaatatccagctttaccggaatcggcgtcgcatcgccatccaacaattcaaggcgcggcgcggcatcaaaatggttagcttcccgctcattctccaggcgaggcaggcgaaaattgacctggttgatgagctgggtattaaaactgaccaccagcggtggggagatatacagccgttcttcactattggaaagatgaatcgtcttctcaacgcgaaacactaactgatgcggtccattatccagttcaatgctgtccgcaccgcgcagcagagagctggaaaccttcttgccgtcgagtaccagaagatcgacatcggtactaagccgcagcgtggtggcaaaaacggataccggcaaacataatgcaatcaaggtggtcacgatgccggttttcataggtagctcctgtcaaaagaccgcccgaataataatgtgtcaaaatttttctttaatcatacttactaacatatagacatatttcccgcttttgctctcattcattcgtattagctgcatggttggcatgtcggctttgtcgtacactttgttaaacagtctggaggaaataatgaaagaaaccgatattgcaggcattttaacgtccactcacaccattgcgctggtgggggcaagcgacaaacccgatcgtcccagctatcgcgtgatgaaatatctactcgaccaggggtatcacgtcattccggttagcccaaaagttgccggcaaaacgctgctgggccagaaggggtatggcacgctggcagacgttccggaaaaagtcgatatggtcgatgttttccgtaatagtgaagcggcgtggggcgtggcacaggaagctattgccattggcgcgaaaactctctggatgcaactgggggtgattaatgagcaagcggcagtactggcacgggatgccgggttaaatgtggtgatggatcgctgcccggctattgagatccctcgcctgggcctggccaaataaaaaatccccggaaggcaaaaaccttccggggatttgttcagggattagttacgcagacgcggggcctggagttgtttgcggatggtctgcgccagctcatccatggatggctgttcaggatgttcatcctgcaattcgctacttagctgggcttcagccaggtaggtatgaaccggtaggccgttatcgtcctccatcactacgtgataccacggagcggcgcgaagctcgtcattcaccgccagctcatcagggctcggttcagagaggctataaaccgggtcgatatccacgaccactccgagataacctaacagggaatggcggacctgctggccgataccgaatttgctggcaatcatagtcacctcccgggaaatctttacctttgatataagggtaaaattccacatttcaagttacatgacgcgacaggcaaaccctttcagatatagcccttccggataggtagcgatcaccggatgatcggctgcctgacggaactgctctataaattgtacatcacgaccggcatcaattgcggcatccgcgatgattttctgaaataaatcgctggtcatcagaccggaacaggagaaagtcaggagaataccgccttcattcagcagctgaatcgccagcatgttgatgtctttataaccacgacacgcgcccatcaactggcttttattctcaacaaacttcggcgggtccatcacgataacgtcaaatttttcaccgcgatcgcgataagtacgcagcaatttaaagacatcatcacggacaaactcagccttgctcagatccagtttgttcagctcaacgttctgccgtgcaatatccagcgcttcctgggaggtatcaacgctgacaacctggctgcaaccgcccatcagtgcgcttacggcgaaaccaccggtataggagaaacagttcagcacacgtttattttcaacgtagcggcgggtagccaggcggctatcacgctggtccaggtagtagcccgttttgtgtccgtgctgaatatccaccagcagtttcattccgtgttcttcaatcggcagcagggcaggtggcaactcgccggtgacggggccctgggtcagctccattccttcttttttacgtaccgcgacgtcgctgcgatcgtaaatgctacattccgggtacagcgtttgcagggcactaattaatgccgcgcgctgatattctgccccagcactcagcagttgcagcaccagaaaattaccgaaacgatcgatagtaatacccggcaggccatcagattctccggcgattaaacgatagctgtcgaggccatctttttgcgccagccagtcacgccatttttgtgcttgttgcaaacggcgggaaaaaaaagcaatgtcgatagactcagacgggtcaaacgtccagacgcgcgcccggatttggctagctgggctataagcgccgcgtgctaaccattttccctgatgatcaacaatatcgatggtttcaccgaggctggctttaccttccatgcgggcaacggccccggaaaagacccacggatggcgacgaagtaatgatttttcgcgccctttggctaacactaaacgtacactcataatttacttttctgtcgatgcaaagaaatgggcgtcattgtccggagttttccatggatttgcaacgcgtccattaaggataaggagagcagcaatgagcaaagtctgcataattgcctgggtttacgggcgagttcagggcgtaggatttcgctacaccacacagtacgaagcgaaaagactgggtttaaccgggtacgccaaaaatcttgacgatggcagcgtggaagtggttgcttgcggtgaagaagggcaggtggaaaaattaatgcagtggttaaagagtggcggcccgcgttctgcgcgtgtagaacgggtgctcagcgagccgcatcatcccagcggggaattaaccgattttcgtatccgttaaatacattttaccggttttggcaggccagcaattttggtggcttgcttagccggacctttcggaaacagtcggtataaatagcggctgttacctttttcttcgccaaatttattcgccatcgcttttaccagcatacgaatcgccggagaagtattgaattccagatagaaatcacgcacaaaacgcaccacttcccagtgttccggactcaggctaatcccttcgttctctgcaatcaccacagccagcggctcactccactggctgctttctttgagatagccttcggtatccgtttctatctctttaccttcgaagatcagcataattattactaccttaatcagactggcggcagtgtaacaaaaaacaaagccccgcataaagcgaggctatgaaagtgttagcgggtgagattaatcgcggctagcgaagcccagaatgctcagcaggctgacgaagatgttgtacaggctaacatacaggctaaccgtggcacgaatatagttcgtctcaccgccatgaatgatgttgctggtttcaaacaagatagcgccagaggagatcagaatgaagaccgcgctgatcgccagatgcagagcaggcagctgcaggaagatattcgcaaccataccaatcagcaccaccacaatacccgccatcagcataccgccgaggaagctcatatctttgcgggtggtcagcacatatgcagagcagcagaagaacactaacgccgttccgcccagtgccatagcgattacgtcacccattccggcagacagataggtgttcagaataggtccgaggatataacccagaaaaccggtaaaggcgaatgcggagataatcccggtcggcttattcgccgttttataggtcaggaacatcaaaccatacatacccaccagcgtcagaatcagacccggagatggcagcatcagcaccgtactggcagttgcggtaatcgcgctaaaggccagcgtcaggctcagcagaaaataggtattacgcagcaccttatgggtgctaagcagacttgtacggtcatgactagaactaacaatacgatccattgagtcactctctatgacagatgtaattaattaagcagcataatgataatgcgtaagggcacccagaagttttacccatctttacgcatttgatctggaacaggtttaacagcggattatcaggtcattaagcaaatataacgccctgagaatttcgacaggcaaaagaaaaaggggttagcatttagctaaccccttatcttattggaatgacgcgcactataaacatcccgatgcggcgtgtaaacccctaatttgtttgtttgcctgaaaaacagccaaaagtgcattgatagcgtgaaataacagcagattgatcatttcatcaccatgaattccttctcttttactcgtttagcaaccggctaaacatccccaccgcccggccaaaagaaaaataggtccatttttatcgctaaaagataaatccacacagtttgtattgttttgtgcaaaagtttcactacgctttattaacaatactttctggcgacgtgcgccagtgcagaaggatgagctttcgttttcagcatctcacgtgaagcgatggtttgccttgctacagggacgtcgcttgccgaccataagcgcccggtgtcctgccggtgtcgcaaggaggagagacgtgcgatatgaataacgaggaaacattttaccaggccatgcggcgtcagggcgttacccggcgcagctttctcaaatattgtagtctggctgccacgagcctgggattaggcgcgggaatggcaccaaagattgcctgggcgctggagaacaaaccgcgcattccggtggtatggatccacggtctggaatgcacctgctgtaccgaatcttttatccgctccgctcacccactggcgaaggacgtcatcctttccctgatttccctcgattacgacgatactttgatggctgccgccggaacccaggcggaagaagtctttgaagacatcatcacgcaatacaatggcaaatatatcctcgcagtagaaggtaatccgccgctgggcgagcaggggatgttctgtatcagcagcggtcgaccgtttattgagaaactcaaacgtgccgctgccggagccagcgcgattatcgcctggggaacctgcgcgtcctggggctgcgtgcaggccgcgcgacccaatccgacgcaggcaacgcctatcgacaaagtcatcaccgacaaacccattatcaaagtacctggctgcccgccgatcccggatgtgatgagcgccatcattacttacatggtgacctttgatcgcttgccagatgtcgacagaatgggccgtccgctgatgttctatggtcagcgaatccacgataaatgctatcgccgcgcccacttcgacgccggagagttcgtccagagttgggatgatgacgctgcccgcaaaggttactgcctgtacaaaatgggctgcaaagggcctaccacctataacgcctgttcctccacacgctggaatgatggcgtttctttcccaatccagtctggtcacggctgcctgggctgtgcggaaaatggtttctgggatcgcggtagcttctacagccgcgtggtcgatattccgcaaatgggtactcattccaccgccgataccgtcggtttaaccgcgcttggcgtggtggcagcggctgttggtgtgcacgcagtcgccagcgccgttgaccagcgcagacgtcataaccagcaacctacagaaaccgaacatcagccaggcaatgaggataaacaggcatgagcactcagtacgaaactcagggatacaccatcaataatgccggacgccgcctggtggtcgacccgattacgcgcatcgaaggccacatgcgctgcgaagtgaatattaacgatcagaatgtgatcaccaatgccgtctcctgcggcaccatgtttcgcgggctggagatcatcctacaagggcgcgacccgcgcgatgcgtgggcgttcgttgaacgtatctgcggcgtctgtactggcgtacacgccctggctagcgtttacgccatcgaagatgctatcggtattaaagtgccggacaacgccaatatcatccgcaacattatgctggcaacgctctggtgccacgatcatctggtgcacttctatcagcttgccgggatggactggatcgatgtgttagatgcgctgaaagccgacccgcggaaaacttccgaactggcgcaaagtctctcctcttggccgaaaagttcccctggctatttcttcgacgtacaaaaccgcctgaaaaaatttgttgaaggcgggcagttggggatcttccgcaatggctactgggggcacccgcagtacaaactgccgccagaagctaacctgatgggctttgcccactatctcgaagctctcgatttccagcgtgaaattgtcaaaatccacgcggtctttggcggtaaaaacccgcatccaaactggattgtcggcgggatgccttgcgccatcaacattgacgaaagcggcgcggtcggggcagtcaatatggaacgcctgaacctggtgcagagtattatcacccgcacggcggacttcattaacaacgtgatgatccccgacgccttagccatcggtcagttcaacaaaccgtggagcgaaatcggcactggtctttctgataaatgcgttctcagctacggcgcattcccggatattgccaacgactttggcgagaaaagtctgctgatgcctggcggcgcggtgattaacggcgacttcaacaatgtgctgccagtggatttggttgatccgcagcaggtgcaggagtttgtcgaccacgcctggtatcgatatcccaacgatcaggtcgggcgtcatccgttcgatggcatcaccgacccgtggtacaaccccggcgatgtcaaaggcagcgataccaacattcagcagctgaatgaacaggaacgctacagctggatcaaagcgccacgctggcgcggtaacgcgatggaagtggggccgctggcgcgcacgttaatcgcttatcacaaaggcgatgctgcgaccgttgagagcgtcgatcgcatgatgagcgcgttgaacctgccgctttccggtatccagagtacgttaggccgcattttgtgccgcgcgcacgaagcgcagtgggccgcaggtaagttgcagtatttcttcgacaagctgatgaccaacctgaaaaacggcaatctcgccactgcttccacggaaaaatgggaacctgcaacctggccgacagagtgccgtggtgtcggttttaccgaagcgccgcgcggggcgttaggccactgggccgccattcgcgatggcaagattgatctctaccagtgcgtggtgccgaccacctggaacgccagcccgcgcgatcccaaagggcagattggcgcttatgaagcggcgctgatgaacaccaaaatggcgatccccgagcaaccgctggagatcctgcgtactctgcacagctttgacccgtgcctcgcctgtagtacacacgtgctgggcgacgacggtagcgagctgatctccgtgcaggtgcgttaacagcgaaggagaatcatcatgcaacagaaaagcgacaacgttgtcagccactatgtctttgaagcgccagtgcgcatctggcactggttgacggtgttatgcatggcggtgttgatggtcaccggatactttatcggcaagccgctaccttccgtcagcggcgaggcgacgtatctgttctatatgggctacatcaggttaattcacttcagcgccgggatggtttttaccgtggttttgctgatgcggatctactgggcttttgttggcaatcgatactcccgcgagctgtttatcgtgccggtatggcgtaaaagctggtggcagggcgtgtggtatgaaatccgctggtatctgtttctggcaaaacgtccgagtgccgatataggccataatcccatcgcccaggcggcgatgttcggctatttcctgatgagcgtctttatgatcatcactggttttgcgctgtacagcgaacacagccagtacgctatttttgcgccgttccgttatgtggtggaatttttctactggacgggtggcaacagtatggacattcacagctggcatcggctggggatgtggctgattggcgcgtttgtgatcggtcatgtctacatggcgctgcgtgaagacatcatgtccgacgacacggtgatctccaccatggtcaacggctaccgtagccacaaatttggcaaaataagtaacaaggagcgtagttgagctaaataagtaacaaggagcgttcatgagcgagcaacgcgtggtggtcatggggctgggcaacctgctgtgggccgatgaaggcttcggcgtgcgggtggcggaacggctgtatgcccattaccactggcccgagtatgtggagattgtcgatggcggtactcagggactgaacttgctggggtatgtcgaaagcgccagccatctgttgattctcgatgccattgactacgggctggaacctggaacgctgcgaacctatgccggagaacgcattccggcttatctcagcgcgaagaaaatgagcctgcatcagaacagtttctccgaagtgttggcgctggcggatatccgcggacatctgccagcacatattgccctcgtcggtctgcaacccgcaatgctcgacgactacggcggtagcctgagcgaactggcacgggagcaactgcccgctgcggaacaggcggcgctggcgcagcttgctgcgtggggaattgtgccgcaaccggctaatgaaagccgctgtctcaattatgactgtctgagcatggaaaattacgaaggcgttcgcttgcgccagtaccggatgacacaggaggagcagggatgagcaacgacacgccatttgatgcgttgtggcaacgaatgctggcgcgcggctggacgccagtcagtgaatcccgtcttgacgactggcttacgcaagcgccagacggcgtggtgttattaagcagtgacccgaaacgcacgccagaggtcagcgataatccggtaatgattggcgaattactgcgcgagtttcccgactatacatggcaggtggcgattgctgaccttgagcagagcgaagccatcggcgatcgctttggcgtctttcgctttcctgccactttagtgtttaccggcggaaactatcgcggcgtgctgaatggtattcacccgtgggcggaactgataaacctgatgcgcgggcttgtcgaaccgcagcaggagcgtgccagttgatctaaccgcagcaggagcgtgcctcatgagcgaaacttttttccatctgctggggccaggaacgcaaccgaacgatgacagtttcagcatgaatccactgccgatcacctgtcaggtgaatgatgaaccgagtatggcggccctggagcaatgtgctcacagcccgcaggtgattgcgctgttaaacgagttacaacatcaactaagcgaacgccaaccgccgttgggcgaggtgctggcagtcgatctgttaaatctcaacgccgacgatcgtcactttatcaatacgcttctcggggaaggggaagtgagtgtgcgcattcagcaggctgacgacagtgaaagtgaaatacaggaggcgatcttctgcggattatggcgggtgcgcagacgtcgcggcgaaaagttgctggaggacaaactggaggctggctgcgcgccgctggcgttgtggcaggcggcaacgcaaaatctcttgccgacagatagcctgttaccgccgcccattgatggcctgatgaatggcctaccgttggcgcatgagttactggcacatgtacgtaaccccgacgcgcagccgcacagcattaatctgacgcaattacccatcagcgaggctgatcggctttttctcagtcgtctctgtgggccgggaaatattcagattcgtaccattggctatggcgagagctatatcaacgccacggggttacgccatgtctggcatttacgctgtacggacaccttaaaaggcccgttactggaaagttatgaaatctgcccaataccggaagtggtgctggcagcgccagaagatttggtcgactctgcgcagcggcttagcgaggtatgtcagtggctggcggaagctgcaccgacgtaaaaagacggtaagtatcgctttcagtcttatgaatatcgcaatcggcgaatacctctggtcgtagagtttcaggataaagagggagatctaccattatcgggttatttttctctcttcgcctacaggagtgcgcatgtgggatgtcattgatttaagccgctggcagtttgctctgaccgcgctgtatcactttttatttgtaccccttaccctggggctgattttttttgctggctattatggaaaccatttacgtggtcaccggcaaaacaatctaccgcgatatgacgcgcttctggggtaagctcttcggtatcaattttgctcttggcgtggctaccggcctgaccatggagtttcagtttggtactaactggagtttctattccaactatgtgggcgatatttttggcgcaccgctggcgatggaagcattaatggccttcttcctcgaatccacctttgtcgggctgttcttcttcggctggcaacggctgaataaataccagcacctgctggtgacgtggctggtggcgttcggtagtaatctctctgcgttgtggatattgaatgccaacggttggatgcaatacccgaccggtgcgcattttgatatcgacaccctgcgtatggagatgaccagcttcagcgagctggtctttaatccggtcagccaggtgaaatttgtgcacaccgtaatggcgggctacgtgaccggggccatgtttattatggcgatcagcgcctggtatttactgcgcggacgggagcgcaatgtcgcattacgcagctttgccatcggttccgtcttcggtactctggcgattatcggtaccctgcaactcggagacagttctgcgtatgaagtcgcgcaagtacaaccggtaaaactggcggcgatggaaggggagtggcaaacggaacctgcacctgcaccgttccatgtggttgcctggccggaacaggatcaagagcgtaacgcctttgccctcaaaattcccgcgctgctagggatcctcgccactcacagtttagataaacccgtgccgggtctgaagaatttgatggctgaaacctacccacgcttgcaacgcggacgtatggcctggctgttaatgcaggaaataagccaaggcaatcgtgagccgcatgtgttgcaggcattccggggactggaaggtgacctgggctacggcatgttgctctcccgctatgcgccggatatgaatcatgtcacagccgcacagtaccaggcggcgatgcgtggcgcgatacctcaggttgcgccggtattctggagtttccgcatcatggtgggctgtggttccctgctgctactggtgatgctgattgcgcttgtccagacgctgcgtggcaaaatcgaccagcatcgctgggtgctgaaaatggcgctctggagtttgccgttgccgtggattgcgattgaagccgggtggtttatgaccgagtttggtcgtcagccgtgggcgatacaggacatcttaccgacatactccgcgcactccgctttaaccacaggacaactggctttcagtctgatcatgatcgtagggctttacaccctgttcttaatcgccgaagtctacctgatgcagaaatatgcccgtctggggccgagcgcgatgcagagtgaacaaccgacgcagcaacaggggtaaaggagaaaatcatgtttgattatgaaacattgcgcttcatctggtggctgctgattggcgtgatcctggtggtctttatgatctccgacggatttgacatggggatcggctgtctgctgccgctggtggcgcgtaatgatgatgaacgccggatagtgataaacagcgttggtgcacactgggaaggcaaccaggtctggttgatcctcgctggtggggcattatttgccgcctggcccagagtgtatgcagcggcgttttccggcttttatgtggcgatgatcctggtgctgtgcagtctgttcttccgcccgctggcctttgattatcgcggaaaaatcgccgatgcacgctggcgtaaaatgtgggacgccggtctggtcatcggcagtctggtgccgccggtagtcttcggtatcgccttcggcaacttgttgctcggcgtgccgtttgccttcacaccgcaattacgcgtggagtatctcggcagcttctggcaactgctgacgccattccctttattgtgcggattgctcagccttgggatggtgattttgcaaggtggcgtctggttacaactgaaaactgttggtgtgattcatctgcgtagtcagctggcgaccaaacgcgctgcactgttggtgatgctgtgctttttgctggcgggttactggctgtgggtcggtattgatggctttgtactgctcgcccaggatgctaacggtccttccaatccgttaatgaaactggtggcagtgctacctggtgcctggatgaataattttgtcgagagccccgttttgtggatcttcccgctgctgggattcttctgcccattgctgacggtgatggcgatttatcgtggtcgcccgggttggggatttttgatggcaagtttgatgcaatttggcgtgattttcacggcaggcatcacgctgttcccctttgtcatgccgagtagcgtgagtccgatctccagcctgacgttgtgggacagtacttccagtcagctgacgctgagcattatgttggtaatcgtgctgatatttttgcccattgtgttgctctacactctctggagctactacaaaatgtgggggcgcatgacaacagaaactctccgccgtaacgaaaacgagttgtactaaggagcagaaacaatgtggtatttactttggttcgtcggcattttgttgatgtgttcgctctccacccttgtgttggtatggctggacccgcgtctgaaaagttaacgaacgtaggcctgatgcggcgcattagcatcgcatcaggcaatcaataatgtcagatatgaaaagcggaaacatatcgatgaaagcgatcttaatcccatttttatctcttctgattccgttaaccccgcaatctgcattcgctcagagtgagccggagctgaagctggaaagtgtggtgattgtcagtcgtcatggtgtgcgtgctccaaccaaggccacgcaactgatgcaggatgtcaccccagacgcatggccaacctggccggtaaaactgggttggctgacaccgcgcggtggtgagctaatcgcctatctcggacattaccaacgccagcgtctggtagccgacggattgctggcgaaaaagggctgcccgcagtctggtcaggtcgcgattattgctgatgtcgacgagcgtacccgtaaaacaggcgaagccttcgccgccgggctggcacctgactgtgcaataaccgtacatacccaggcagatacgtccagtcccgatccgttatttaatcctctaaaaactggcgtttgccaactggataacgcgaacgtgactgacgcgatcctcagcagggcaggagggagtattgctgactttaccgggcatcggcaaacggcgtttcgcgaactggaacgggtgcttaattttccgcaaagtaacttgtgccttaaacgtgagaaacaggacgaaagctgtagtttaacgcaggcattaccaagcgaactcaaggtgagcgccgacaatgtcagtttaaccggtgcggtaagcctcgcaagtatgctgacggagatatttctcctgcaacaagcacagggaatgccggagccggggtggggaaggatcaccgatagtcaccagtggaacaccttgctaagtttgcataacgcgcaattttatttgctacaacgcacgccagaggttgcccgcagccgcgccaccccgttattagatttgatcaagacagcgttgacgccccatccaccgcaaaaacaggcgtatggtgtgacattacccactagtgtgctgtttatcgccggacacgatactaatctggcaaatctcggcggcgcactggagctcaactggacgcttcccggtcagccggataacacgccgccaggtggtgaactggtgtttgaacgctggcgtcggctaagcgataacagccagtggattcaggttagcctggtcttccagactttacagcagatgcgtgataaaacgccgctgagtttaaatacgccgcccggagaggtgaaactgaccctggcaggatgtgaagagcgaaatgcgcagggcatgtgtagcttggcaggttttacgcaaatcgtgaatgaagcacgcataccggcgtgcagtttgtaatgcataaaaaagagcattcagttacctgaatgctctgaggctgatgacaaacgaagaactgtctaatgcgtagaccggaaaaggcgttcacgccgcatccggccactttcagtttgcaatacgtacgcttgagatcaggattgtctactttgagtataacatccttgtgaaatctccctttcctcataccgcttgcactatatactgcgggtaggaaaggcgcgcagagggaaatataagattgttaactatccccctctggaaatacgacttgtgagcataagataaatcttagcaaaatacaaattaaagataaggaaattgttacgaaagctattaattattgttggtaatatagtttcaagtggtactataactggctgttaaatggcatttataactattaggtgcagagatattcgcttaaatggattagtttctttgtggaaaagtaactgatgttataatgtatgatgttgactatttcactattccaataaaaccagtcagctttaaacaagcagcgtcatattaagagagataaacatttgccgctgttggtcctcgcaggccatttacgcggcaaaattccacacgtaatcctggtataagcacttctgcgtcgcggggagtgaatgcggaaatatggacctgaacttctttacgaccgtcggaggggataatgaatcctttgccgcttttgcgatcaaaggttttgacaattcctgtcattttacgggacaaacaaattccttactgaaaatactgcgctgcactatacggggttaataaaataaagccagcgatatttaagaccgccggacggctaaaataaaatttgcttaatctcaattatcatgcgttaatagctgcgtcggtttgaaagacagacagcatacaaagtagtttactaaagcagttctcattatcaggcattatccccttcttttgagtctctctcctgaacactaagtagtttctgtattaaagccctgtttgccgaaaggcccaaaatgaaggaagtaaaatatgtctaataaaatgactggtttagtaaaatggtttaacgcagataaaggttttggctttatcactcctgatgatggcagcaaagacgttttcgtccatttcaccgccatccagagcaatgaattccgcacgctgaacgaaaatcagaaagttgaattttctattgagcaggggcaacgtggccccgcggcagcgaacgttgttacgctctaaggttgccattattactcaacatctccatttccgctgtccatgttgtcatggttcacagtaccgcacatcggcattcgatgtgacggagcgaaaccctttgggcgctaagtgtattttttgtaaatcgacgatgatcacctttgataacgtcgcgctgcaaatacgcactgaccatgcgccgctggattagtcaaaataatatcaggctccctcgtggagccttttttatatctgccttatttttcttcaacgctgtatgtatagtaagcgataacctgttgattattgaatctttcggggagatggcttataacatttcttacctgaccagggtaccgggaaccaacaccttactggcgtgttgctgtcttttaagaccagaagaggttaacagtgaatattgaagagttaaaaaaacaagccgaaacggaaatcgccgactttatcgcgcaaaaaatcgccgagctgaacaagaatacagggaaagaagtctctgaaattcgcttcaccgcacgagaaaaaatgaccgggcttgaaagttatgatgtcaaaatcaaaataatgtgattttgtgaacatcaccccgtgcgaggtgatgttccgcttgttgctaatttagtgaccaatcattggcgcttgtggaattaagcgtcggtacaattcctccggcaccgggctttgccatactcccgcatacattgcgtaaccaatcaccgcaaacataatccccagaaccagtagcgtcattaaccagccagacaacgcaaaggcttttttatttgccgcaggtttttgcagactaaaggtcaatgtactggctaccggacaactctctacgcaagtcatacagccggtacattccactgttcgtacctgaattaatttatcgaccgggatccgacttgggcaattttttgcgcatttgccacagtcgatacaactttcggcattgcgacgaatcttaaacgggctcaataggctaaccacgcccatcagcgcgccatatgggcaaagataacgacaccaggcatggcgaataaacaggctggcaatcagcaaaacggtcacgctgattaatgtcgcggtccccatatgacgaaagaaatcgagcattttaacgtccatcaccacgctgtaggggctcaacataaaatagtgaatcgcctgagcgggcatcaataacgcgatatagataaaaaaactcaacagcaaatacttcacgccgcgcagaggaatatccagccagcggggaaggacacattgccgaccaaacagtttgttaccgagatcgccgattaattcagaaagcgtaccaaccgggcataaccaactgcaaaaggcctttttgagtaatagactgatgacgataaaagcgaccaataacagcatcgcggcggcgtggacggacggtaactgacctgttacaaggctatatttcagattcatcagcccggcaatcggtagccagccttcgatacctcccggtctggcgacaaatgtcgtgctacttgccgtttcgtaatagcgcacccaataccagaacgtgatggcaatataaatattcattgccaacagtaataattgcgtcgctttacgccaggtcgtggcattacgccagtcattccacggtaatttgccgcccgtcgtgcctggccgccgctgccagcgggttcttttattctctgccatgattttgccagtccgttaagttgtataccaaatgccactattctagttgttcttaactggctgatattgattcaaatcgcgttcaggtctttcttatgcaaccatgcttccagagcggcaacactgcgtgtaatttcttcgtgtggaaggggggcagataatggctgctgctccagttgtgcgcatagctggctggcgatatgcattcccagactgctgcaactgctttttagctgatgcgcggcacgctttattttctcgctatcctgactggcgcgggcaatgtcgatttcatcgagaagcggcagggcatgttgtgtaaataataccagccattcgtggatcttctccgtccccattaactgagcatcttcattgagttggcttacatccaggctttgatcattattgacttgcagttggagatagtgcgccagtaactgaccgagcacttcacgcggcaccggtttagggataatcccgcggaataaactactggtacgctggcgcagcgtttcgtcaatgacatgggcgctaaagccaatcaaaaccaggctcggatattgctgtgccagttgtcgggcaagcgtaatgccgtcgatatccggcagatcaaaatccaccagtgcggcagcaaacggttcgctattttgcagtgtctctaaagcctgcgcggcattgccaacagcaacaatctgcgcaccactggttttcagcatctcaatggtaattcgctgggttagcgggttatcttcaattaacagcaaacgtaaaccgtcaagacgcaccgcctgattgactgtttttggcacgggtgccgtggcaacacgtaacggcaagcgtaaacaaaaacagcttccaacctccggcgtgctggtggcgctcagttcgccgcccatcgcctgggccagacggctactgatagtcagtcccagcccggtgccgccgcgtttgccgcttacctgcacaaatggctggaagatttctgccagtttcgcgggatcaataccgcagccgctgtcttccacttcgaccagccattgctcgccatcagtgcgactacgcaggataatgtacccttcgtcagtaaaacgcagggcgttgctcaacaggttggttataacctgacgaatacgtcgtggatcgcccattaacgcgcacggcatatcatcggcaattgccgttgccaggcgaatcgggcgacctttcacccgtccgctcattaattgcagggtactttccagcagcgggcgcggttcaaagggctcatcgctgacgctaacattcttgccacctgcttcgatagcggaataatcgagaatatcgttgaggatggtcagcaagctttcaccagagtcagtaattgcccgcaaatcatcacgctgggcgttaagtgcggggttatctgccagcagttgagcagtgccgagaataccgtacagcggtgtgcggatctcatggctcatcgccgccagaaacgcgctttttgcctggctggctttttctgcttccgcccgtgcctgtcggtgttctatcaccagttcctgcaattcagctgtacgcgctttgacctgcgccgccagctgttcgcggtggcgattcagtgcatgaacattgctgcgaaacgcatccatcagccgcccgatggtatccagctcccgtacgccagcggtttccgggaaaggggagtcaatatcaccgtccagcagccgttgcagcgcctgcgtttgttcggcaagtggacgcgtgacactgcgataaaccacgcgccagaggatcagaatcagtgcgcaaagactaaccatccccagcaataacaggctgtattgcccgcgtgcactcgctttttccagatgcgccagtccgtgctgattacgcagctcaatggtgtcgaccagctgactgacttcgctactaaactgcgcgaactgggcgatgttattttgtgcgagagtttgtaggtgattgctgatttcactgtcctgctgatacagcgccagcaaatcgctatattggctaacggtagttaacgttgttgcgacctgcgcacgaacacccggatcttcaatgcgtatttgccgacgttgcagaattttcaccgcattattgagctgcttttccagcgttggtgcatttttctggatctgctccagccccagattcatcaccatttgctgcacccgcagagcgctaaggcgcagttcattcatctggttaacatactcaagatcgatatcaatcagccgatcgagtgcactttcagcagcctgacgctgatcttgttcgatcaaatcgtaaatcccggcctgggtcgctccagcggaagttgtcgcattattcgcctgaccttgcgccaggcgtgcgatctcatcggcggcagcgactatctgctgactgagttgctgttgttgctggcgcagttgcaaacgctgccccaccagttccccttgctgacgtaagctacgggagatctcctgctcctgttgttcaatagcggtggtatcaaaaccttgttcccgtaacgcttgcagcaacgcattaatcttcaggctttgtgcggtgagcattcgcccctgcgcctgccacatcttttcgttatcggcactggtcaggttctgcgcggcgaaaagttcccaggcgctggcttcgctcaactggcgcgccatattcatggtaggaatcaatgcctgagtgttgtctttttccacctggctgataaagcgcaggttgtaccatcccaccagggtactggtcagggttaacagcgccatcagggcaaagcccatccagagtcttcgggtcagggttaaattcacggtcggtgcactttaggtgaaaaaggttgagtcgcaaagcggaatgcatctagcataaagccttattattgatgaggctatcatgcgcgtactgctatttttacttctttcccttttcatgttgccggcatttagcgctgataacctgttgcgctggcatgatgcgcagcatttcacggtgcaagcctctacgccgcttaaagccaaacgcgcatggaaactgtgcgcgctttatcccagcctgaaagatagttattggttaagcttgaactatggtatgcaggaggctgctcgccgctacggtgtggatttaaaagtgctggaggcaggcggctacagccagttggctacccagcaagcacaaatcgaccagtgtaaacagtggggcgcagaggccattttgctcggtagtagcacgaccagttttcccgacctgcaaaagcaggtagcaagtctgccggtgatcgaactggtaaatgctattgatgctccccaggtgaaaagccgcgttggtgtgccctggtttcagatgggctatcaaccggggcgatatctggtgcaatgggcgcacggtaaaccactgaatgtgctgttgatgcccggacccgataacgccgggggcagtaaggagatggtcgagggttttcgcgcagccattgccggaagcccggtgcgtattgttgatattgcgcttggtgataacgatattgaaatccagcgtaacctgttgcaggagatgctggaacgccatccagaaatcgacgtcgttgccggaacggccattgcggcagaggcggcaatgggggaagggcgtaacctgaaaacgccgcttaccgtggtgagcttttatcttagtcatcaggtgtatcgcgggctgaagcggggaagagtgattatggctgccagcgatcaaatggtctggcagggggaactggcggttgagcaggccatcaggcaattacaggggcaaagcgtttctgataatgtcagcccaccgattttagttctgacgccgaaaaatgccgaccgtgaacatattcgccgcagcctgagtccagggggatttcgtccggtctatttttatcagcacacaagtgcggctaagaaataatcagcacacatcagcggctaagaaataaccttcaccatgttgcgtcaccagtaaatccgcgctgagtttatgacgtaaacgacgaattaacacatcgacggtgcgcaggtcagggttttccacccgacgcgcagaaagcatacgtagcagacgttcacggctgagaatttcgcccggattcgtcacaaatgccaccaacatttcatactctgcgcgggtcagtttaatcggctcgccatcccgctccagcgtatggcggctcacattcaggcaataaccggcaaagcgatagcagttgtcctgagtgtgcggttgagcttgtcgcgcgaggtcgattcgccagagcagatttttcacccgtactaccagttcgcgcagttccagcggtttggtgacgtaatcgtctgcgcccatttccagcccaacaatacggtcaatccgatcgctgcgtccggtaaccagaataatccccaccgtactgcgttctcgcagggcgcgggttaacatcaggccattttcatcgggtaagttgatatccagcagaattaaatctacgctctgattctgcataatttcccgtagcccagcaccgctcgccgtaacggaaacggtatacccctcctgagtgaagtaggattgtaatcgcgcctgggtaaccggctcatcttcaacaataacaatgtgatgtggcatcagagggttttactcattctgttcatatctgttcatattctgccgtaagccgttcatcctgaccagtgccgctgttcatatttgctcattaagatcgcttcactaaaccataattctacaggggttattatgcggaaactctggaacgcgctacgccgacccagtgctcgttggagcgtactggcgctggtcgcaattgggattgtgattggcattgcgctgattgtattgccacacgttgggatcaaagtcaccagcacaaccgaattttgtgtcagttgccacagtatgcaaccggtgtatgaagaatataaacagagcgtgcatttccagaacgcctccggcgtgcgagctgaatgccatgactgtcatatcccgccggatattccaggcatggtgaagcgcaaactggaagcgagcaatgatatctaccagacctttattgctcactccattgatacacctgaaaaattcgaagccaaacgcgcggaacttgccgagcgtgaatgggcgcgaatgaaagaaaacaacagcgcaacctgccgctcctgccataactacgatgcgatggatcatgcgaagcagcatcctgaagcagcacgtcagatgaaggtggcagcgaaagataatcaatcctgcatcgactgtcataaaggtattgcccaccagttaccggatatgagtagcggcttccgtaagcagttcgatgagctgcgcgccagtgctaatgacagtggtgacacgctgtactctattgatattaagccaatttatgcggcgaaaggcgataaagaagcctctggttctctgctgcctgctagcgaagtgaaagtccttaaacgtgacggcgactggctgcaaattgaaattaccggctggacggaaagcgccggacgtcagcgtgtactcacccaattcccaggtaaacgcatctttgttgccagcattcgtggtgatgtgcagcagcaggtaaaaacgctggagaaaaccaccgttgccgacaccaataccgagtggagcaagttgcaggccactgcgtggatgaagaaaggcgacatggtgaacgatatcaaaccgatctgggcttatgcggatagcttgtacaacggcacctgtaaccagtgccacggcgcaccggaaatcgcccactttgacgctaacggttggatcggcacgctcaacggcatgattggctttaccagtctcgataaacgtgaagaacgcaccttgttgaaatatctgcaaatgaatgcgtctgacaccgcaggtaaggctcacggcgataagaaggaagaaaaataatgaacaataacgatctctttcaggcaagtcgtcggcgttttctggcacaactcggcggcttaaccgtcgccgggatgctggggccgagtttgttaacgccgcgacgtgcgactgcggcgcaagcggcgactgacgctgtcatcagcaaagagggcattcttaccgggagccactggggggctatccgcgcgacggtgaaggatggtcgctttgtggcggcaaaaccgttcgaactggataaatatccgagcaaaatgattgccggattgccggatcacgtacacaacgcggcgcgtattcgttatccgatggtacgcgtggactggctgcgtaagcgccatctcagcgatacctcccagcgcggtgataaccgttttgtgcgcgtgagctgggatgaagccctcgacatgttctatgaagaactggaacgcgtgcagaaaactcacgggccgagtgccttgctgaccgccagtggttggcaaagcacggggatgttccataacgctagcgggatgctggcgaaagctattgccttgcatggtaatagcgttggtacgggcggagattactctaccggtgctgcgcaggtgatcctgccgcgcgtagtcggtagcatggaagtgtatgaacagcaaacctcctggccgctggtattgcagaacagcaaaaccattgtgctgtggggctccgatttgctgaaaaaccagcaagcgaactggtggtgcccggatcacgatgtttatgaatattacgcgcagctaaaagcgaaagtcgccgccggtgaaattgaggtcatcagcatcgatccggttgtcacatccacccatgagtatctggggcgcgagcatgtgaagcacattgcggttaacccgcaaactgacgtgccgctgcaactggcgctggcacatacgctgtacagtgaaaacctgtacgacaaaaacttccttgctaactactgtgtgggttttgagcagttcctgccgtatctgctgggtgagaaagacggtcagccgaaagatgccgcatgggctgaaaaactgaccggcattgatgccgaaaccattcgtgggctggcgcggcagatggcggcgaacagaacgcaaattattgctggctggtgcgtgcagcgtatgcagcacggtgaacagtgggcgtggatgattgtggttctggcggcgatgctggggcaaattggcctgccaggtggtggttttggttttggctggcactacaacggcgcaggcacgccggggcgtaaaggcgttattctgagtggtttctccggctctacgagcattccgcctgttcacgacaacagtgactacaaaggctacagcagcactattccgattgcccgttttatcgatgcgatcctcgaaccggggaaagtgatcaactggaacggtaaaagcgtaaaactgccgccgctgaaaatgtgtatttttgccggaactaacccattccatcgccatcagcagatcaaccgcattattgaaggcttgcgcaagctggaaacggttatcgccatagataaccagtggaccagtacctgccgctttgccgatatcgtactgcctgcgaccacgcagtttgagcgtaacgatctcgaccagtacggcaatcactccaaccgtggcattatcgccatgaaacaggtggtgccgccgcagttcgaggcgcgcaacgacttcgatattttccgcgagctgtgccgtcgctttaatcgcgaagaagcctttaccgaagggctggacgaaatgggctggctgaaacgcatctggcaggaaggtgtacagcaaggcaaaggacgcggcgttcatctgccagcgtttgatgacttctggaataacaaagagtacgtcgagtttgaccatccgcagatgtttgttcgccaccaggcattccgcgaagatccggatctcgaaccgctgggcacgccgagtggcctgattgagatctacagcaaaactatcgccgatatgaactacgacgattgtcaggggcatccgatgtggtttgagaaaatcgaacgctcccacggtgggcctggcagccaaaagtatccgttgcatctgcaatctgtgcatccggatttccgacttcacagccagttatgtgagagcgaaacgctgcgtcagcaatatacggtagcgggtaaagagccagtattcattaacccgcaggatgccagcgcgcgcggtattcgtaacggtgatgtggtacgcgtctttaacgctcgcggtcaggtgttggcaggggcagtggtttctgaccgctatgcacccggcgtggcacgaattcacgaaggggcatggtacgatccagataaaggcggcgagcctggtgcgctgtgcaaatacggtaaccccaacgtgttgaccatcgacatcggtacaagccagctggcgcaggcgaccagtgcgcacactacgctggtggaaattgagaagtacaacggaacagtggagcaggtgacggcgtttaacggccccgtggagatggtggcgcagtgcgaatatgttcccgcgagccaggtgaaaagttgaattaacccgcgtcgcaggtgaaatcatgaccacgctgacagcacaacagattgcctgtgtttacgcctggctagcgcagttgttctcccgtgagctggacgatgaacaactgacgcaaatcgccagtgcgcagatggctgaatggtttagcttgctgaaaagcgaaccgccgctcactgcggcggtgaacgagctggaaaaccgtattgccacgctgacagtacgtgacgatgcccgtctggaactggccgcggacttttgcggcctgtttctgatgaccgacaaacaagcggcgctgccgtatgcaagcgcctacaaacaggacgagcaagagattaaacgcttgttagttgaggcagggatggaaaccagcggcaatttcaacgaaccggcagatcatctggcgatctatctcgaattgctcagccatctgcattttagcctgggagaggggaccgttcctgcgcgaagaatcgacagtttgcggcaaaaaacactgacggcgctgtggcaatggttaccagagtttgttgcgcgttgtcgtcagtatgacagctttggtttttacgcggcactaagccagttattgctggtgttagtggagtgcgaccaccaaaacagataacgtcgtttgtgcgcctgaaaagacgcgtttagcgtcgcatcaggcattatggcgcagttgccggatgcggcgtgaacgtcttatccggcccacaggaactgtaatctttgtagaccggttaagatgcgtcatcgcatccggcaaacacacatcacggatgagctacaaaccgggaaagccgctggcgcagcaggcggttttcctgcttcaggtgcgcaatatcatccattaacgtcagcgccaccgcgatccccggccagtccagagccagttcatgacgcaggcgtaccgcgcgttgcaccacaatggcggcatggtcgtcaaatacccaggttgtttcctggatctcacgcggttcaaccacccccaaaccgacaatttcattcaactcctcttcagagatgccggtatgcaggcaaaattcggtaatagtaaaagtcaccgtaacattagccattatgctttcccccaatctttacgtggatcaaaagagctctgggcgtctgccagttgctgccacagcgcggcagtgttttcatccggtttcggcggcatcacgattttcagtaccgcatacagatcgccggtctgttttttgctcaccagacctttgcctttaacgcgcaatcgttgcccggcctggctgcctggcgggatagtcagcaaaatgctttctttcagtgttggaacggtgactttagcacccagcgccgcttcccacgggctaaccggcaccacaatttccagatcctggccgacaatatcaaacagcggatgtggcgcaatatgaatcaccagccacaaatcgccatttggaccgccgttttcgcccggcgtcccctggcctttcagacggatgcgttgaccattgccgacgcccgccgggatcttcacattcagcgttttcggaatttcctgttcgatcatgccaaaggcgttataaaccggcaggttatagctgatggtacgcttatgctcagtaagcgtttcttcgaggaataccgccacttcgatttcaatatcgtggccgcgtgtggcggggcgttgacggctctggcgggcatgctgaccgaaaatactgctgaagatatcgtcaaaatcttcggcgttaaaactctgaccgtcgccatggtggaactgacggttaaattgcggatcgttgcgatgttgccacatctgatcatactcagcgcgacgttgttcatcacttaacacttcccaggcttcagcgacctctttgaagcgggcttcggcatccggttctttgctgacatcaggatggtatttgcgggcaagtcgacgataggcggtcttgattgtcttgagatcgtccgtcggtttcacgcccatgatggcgtaataatcctttaattccatagcgttatctcgcgtaaatcaacacaaattgaaggaacccctgtaaggtaactcctataagtgtagggtaatcctcaaaatttcatatgccaacacagaatatgttattgaaatcatcgcggagaggaggtcgccatcaagatgggttgctgaacatattttaaacaggtgaaaaagggtgagcgatttttgatagttgaaccaggcactttaagtttaactagggcgtcattatttattaaattttatagacgctatatatgggtagtaatatacatggaattagttgcactgcaaataattatttgaaacaggcctggaacgatataaaaaatgagtacgaaaaaaatcaaacatatagtatcacgctttttgaaaacacactggtgtgttttatgcggttatacaatgaactcagacgtaaagtaaatgaagaggatactccatgtctggaatgtgaaagtctagaaaaagaatttgaggaaatgcagaatgataatgatctaagtttatttatgagaatattgcgtactaatgatacacaaatttatagtggggttagtggaggtattacatatactatacaatatgttcgagatattgatattgttagagtgtccttgccgggcagagctagtgagtctatcacagattttaaaggttattattggtataactttatggagtatattgaaaacattaatgcgtgtgatgatgttttttctgagtattgttttgatgatgaaaatataagtgtccagccagagcggataaatacgccgggaatatctgatttggattctgacattgatttgtctggtatatcttttattcagcgtgaaactaaccaggcattaggattaaaatatgctcctgtagatggcgatggatattgtctgttaagagctatactggttttaaaacaacatgattatagttgggcgctggtcagttataagatgcaaaaggaagtttacaacgaattcattaaaatggttgataaaaaaacgatcgaggctcttgttgatacggcattctataatctcagggaagatgtaaagacgttatttggcgttgatctacaatctgacaaccaaattcaggggcagagtagtcttatgagttggagctttctgttttttaaaaaacaattcattgatagttgcttgaataacgaaaaatgtatcctgcatttacccgagtttatatttaatgataacaagaacttgcttgctttagataccgacacgagcgataggattaaagcggtgaagaattttcttgttgttcttagtgatagcatttgcagtttatttattgttaatagtaatgtggcaagtatctccttggggaatgaatcctttagtacagatgaagatcttgagtatggttatttaatgaacactggcaatcattatgacgtttacctccctcctgaactttttgctcaggcttacaagttaaacaataaggaaatgaatgcgcaactcgactatttaaatcgttatgcaatttaatggcaaaggcatatgctaaaaaccattgttattagtctcacacttttttattggtaaatattgtctctgtattggtaacgccgcagatattctgtttagccacaggtgcaattatcagcggcgtacgcgaggcaggggctaatcaggcatagtttgcgtcaaaccttgcctgtttttgaagatgtatatagaaaaacaggcgttcaacaagccattttgcgaacctgttcccggaaaaaagtcatatttctgtcacactctttagtgattgataacaaaagaggtgccaggaatgaacaaaacgctaatcgccgcagctgtggcagggatagttttactcgctagtaacgctcaggcacaaaccgtaccggaaggctatcagctacagcaagtgctcatgatgagccgccataacttacgtgcgccgctggcgaacaatggcagtgtgctggagcagagtacgccgaataaatggccagaatgggacgtccccggtgggcaactcaccaccaaaggtggcgtgctcgaagtgtatatgggccattacatgcgtgaatggctggcagagcaggggatggtgaaaagcggggaatgcccgccgccgtacaccgtttatgcctatgccaatagtctgcaacgtaccgttgcgaccgcacagttctttattaccggcgcattcccggggtgtgatattcctgtgcatcaccaggaaaaaatgggcactatggacccaacctttaacccggtgatcaccgatgattccgccgcattcagtgaacaggcggtggcggcaatggagaaagagctcagcaaactccagcttaccgacagctaccagctactggaaaaaatcgttaactataaagattcccctgcctgtaaagagaaacaacagtgtagcctggtggatggcaaaaatacctttagcgccaagtatcaacaagaaccaggtgtttccgggccgctgaaagtcggcaacagcctggtagatgcgtttactttgcaatattacgaaggttttccgatggatcaggtggcctggggagaaatcaaatctgaccagcagtggaaggtgttgagcaagcttaaaaacggctaccaggacagcctgtttaccagtccggaagtggcgcgcaatgttgcgaaaccgctggtcagttatatcgacaaagctctggtcaccgatcgcaccagcgcaccgaaaattacagtgttggttgggcacgactccaacattgcctctctgttaacggcgctggatttcaaaccgtatcagttgcatgaccagaacgaacgcacgccgattggcggcaaaatcgttttccagcgttggcatgacagcaaagccaatcgcgatttgatgaaaattgaatatgtgtatcagagtgcggaacagttacgtaatgccgatgcgttaaccctgcaggcacctgcgcagcgtgtgacgctggaattaagcggttgcccgatagacgctgatggtttctgcccgatggataagtttgatagcgtgttgaatgaagcggtgaaataacagaaaactcccccgcgagaagcgggggagtcgctggttaaacgtttttacgttcgatggtctgttcgccccaaaaaaggctatctttatcggtcttagcaaaggctttgactaacacttcatcactaccttcttcccaaatcttttccgccattttttcgtcgtacccggcgacttcgaaaatggcctcggctatttccgggctcgtattgcgcagagatgcccattcaccgacgtgatgagctttcgcttcttgagttggcatgcgtatcctcctgttgaagattagccgttaagtttaactgccagacctgcgacatattccccttgataacgagcaatagacagttcttcctggctgggctggcgactaccgtcaccgcctgcgatggtggttgcgccgtacggcgtaccgccgcgaacctgactaacgtcaaataattcctgcgctgcgtagccaatagggacaattaccatgccgtgatgcgcaagggtcgtccaggtggatgtgatggtttgttcctgaccgccgccagtaccggtggaactaaagacgctcgccagttttccgtatagtgcgccggaagcccacaggccgcccgtctggtcgaggaaggtacgcatttgaccggacatgttgccaaagcgggtaggtgtaccaaaaataatggcgtcgtaatcggccagttcttgcggggttgcaaccggtgcagtttgcgttttaccgcctgctttttcaaataattgcggcggcatggtttccggtacacgcttaacgacaacttcagcgccatccactttgcttgcaccctcagcgactgcgcgtgccatcgtttcaatatgtccgtacatggaataataaagcaccagaactttagccatttctaaccactcctcgtgttatctctattccgtagcgattcgctaccacttatttaaagataagacgtccttttcagagtgcaaatttcacaaccacttatttgatttataacaactttcacaagcacgtaattttgtcgcaaaatgacacatttttatctcatcgcgtttttttaatcataagagcggcttatggataattattggagatgatatctattctcgctaagaagctgttgcaggatattaccaaacgcgggtctgcccgcgtcagttcactaagcttagtcccacgtagcgaaaatatggcagccgccatacgccgcgttaattctatgcaatatgatgtctatacccagacggaggtcagtaatggcaaaccatcgaggcggttccggcaattttgcagaagaccgcgaaagagcaagtgaagcaggtaaaaaaggtggacagcacagcgggggtaatttcaagaatgacccgcagcgcgcatctgaagcaggtaaaaaaggtggtaagagcagtcacggcaaaagcgacaactaaccgggctaatcaatgacgaatgcatttttgtctgtagctcgtcaaaaagccatcaccgccggttacccggtggttgatactgatgacaaatgtaagcttgcctgatgcgcgatgcttatcaggcctaccagaagattgcaatatattgaatttgcactgttttgtaggccggataaggcgtttacgccgcatccggcatgaacaatgcgtacgttgtcaacaatctgcaccgccggtaaccccggcggttttctgtttatggctcctgatgaacaacttctggcggtggaacgtcaaccaactttctgcttaacaacgcattgagtaaaatcgcgccaaaggttgctgtaccaatccctcccaacgtaaaaccgcccagcgtgagagcaaaatcacccgcgcccagcactaaggttactgcgaccataatcaaattaccgttctggcttaaatcgacacggttttgtacccatatccttgcgcctgcgacggcaatcagcccgaacacaacaatacttgcaccaccaataaccgcggccggaatggtatgaatcagcgcaccaaatttcggactaaagcccaacagcatggcgatgacggcagcagcaacaaacaccagcgtgctgtagactttggtcacggccatcacaccgatattttcagcataggtggtcacgccgctaccgccgacagagccggaaagcatcgttgccagaccatcgcctacgaatgcccgccccatatacgggtccatattgcgtccggtcatcccggcgactgccttgagatgacctaagttttccgccaccagaatcaccgccacgggcgcaatcagcatcattgcctgaccattaaaagcaggagtggaaaaatgtggcagaccgaaccaggcagcatggctgacgagagtaaaatcgacggcttttcccagccctaaaacgttggtcatcacgccatacagcagacaggcgacaattaatcctacgagaatcaataaccgctggatcatgccacgggtaaacaccgccaccagcccaatacacagcaccgtcattaccgccatccagctatcaaaggcgctagcgcttacacttttcactgcgataggcgctaagttcaggccaatcgccatcaccaccgcacccgtcaccaccggcggcatcagtcgttcaatccagcgcgtaccgattttcatcaccaccaggccaatgacggtataaaccagcccacaggcgataatcccgcccagcgcaatgctgatattcgggttaatgccctgaccgttaaagcccgtcgcggcgatcaccacgccgacaaaagccgcgctggagccgagataactggggacgcgcccgccggtaataaagaaaaacagtaacgtgccgatcccgctcattaaaatggaaagattgggatccagccccatcagaatcggcattaacaccgtcgcgccaaacatcgccaccgcgtgttgaacgcccattactgccgtctgagcaaacggcaatcgttcatccggcgcgaccacgccgctctctgtagaggtgctttttaactgccagtgaggaaaaccgaacattgccatcagctgtctccttaaggaggttaacaagcagggcgcatcagcgcgtgataactgcgatcgaaccacaccagcccgtagggtgtggtgtgacgatgaatcgcttcgatggcgcaaaacagaatgtcgtgggtgccgacgctcaccacctggctgatacggcagtcaaagctaaccagagcctcttccagttgcgggcatccggtcacccccgtctgccagcgggcggcggcaaagcggtgttccatgggcgttttgccgccaaaaaggttactaagcggctcctgcccggcgctaagtgtatttacacacagcgttcgattttcattgaatgccggccagacggacgccccacgattcaggcacaccagtaatgtgggcggcgtatcggtcacactgcagacggcgctggcggtgaacccggcgcgcccggctggaccgtccgtggtgataatattgaccgccgcgcccatgcaggacatcgcatcgcgaaaagtttgttgatcgacaatgttcatagtttgctccttacaacagcccgcaggcttcttcaaaggacagacgtggcaggcgcgcataaagcttgctgctatcgccatagccgatattaatcagcagattgctcttcagcgtgctgcccgtaaaaaaggcgtcgtccacgtgttgacggtcaaagccgctcatcgggccggtatccagtcccagcgcccggcaggcgacgatcagataggccgcctgcatggaactgttgcgaaacgctgtttcttcggcaagttgtgggctggaggtaaaccaactgcgggcatcaccgtggggaaacagtagtggtaaccgttcataaaattcactgtcccaggcgacgatagcggtgacgggcgcggtcagggttttttgcagattgccgctggaaagtgccgggcgcagacgttcttttccttctgccgtgcgggtaaacacgatccgtgccggagaacagttagcacttgtcggcccccatttcatcagggcataaatctcccgtaacgtctcatcgctgacgggtgtctcccgccagccgttgtgagtgcgggcatcggtgaacagggtgctaagcgcacctgggctaacggcttcgttcatagcaattccttacagggcggcttcacggtgatgtaacaggctggcaagcccgttgagtaacagagcattaaacgtttcgggatcggtcacgttgcaggcgtgtccgccatagggcatcaccattttctggctatcgggcagggcggcatgaagttcactggaacatgctgttggcaccagcagatcatcactggcgcagatgatttgcaccgggcagcggatgcgatccgcatggtgactaaagtcagcgcgtttgagggcgttaagtcgacgcagtaaattatttttgccctgaaaatgcgccagtgccagcgcgtcttctgcctccaggcgaggtgcgcgggccgccatccagtcggcgggatagaggaacaacggctgcgcttccacccatgcctgcgcgccgccgctatacagtaatcgttcgcgaacctgaaaacagcggcgcgtatgggcgtttattcgtagccagccgttaacgctgatcagcacagttacgctcgcgggataatccagcgccagctgcattcccaccagcgcaccgagcgcatggccgaccactgcgtaatgctcaatccctgcggctaccagcgcctgatgcagttccgctgccatctgggcgatactgtaatcttctgccagcgtgtcgggattattgccggtgccgcgctggtcgtaacagactacctgatactcctgctccagcaccgccagttgcggtaaccagtaactgccgctacccccaagaccgctaatcaacaccactacgggcgcatcagcataagggggaggactgagactaagtttcatcgcggcctcacttggcgatatgcgcaattgtggcgatttccaccagcgcgtcaggttttaccagtccgcactgaatgcagaatcgcgccggtttatcacccggaaaaaactcggcgtagatttcgttaatcgcggcgtaatttttccagtcggtaataaagatgctgttgaaggtcacatccgccatcgtgccacccgccgtctcgatcaccttgcggatagtttccagaacgtggcgggtttgcgcctttgggtcatcggcaaacagcacgttattatgttgatcaaaagccagcgtaccggagacatacaccacgccatcagccagcgtgccgggaacgaagggggccagcggtgcgctgctgccagcgggaataattacggattttggcatcgttaaactccttaagcgatatgagcaaaggacgtgggagaaagcgcgtcgcagaatgtttcgacgtcgctgacccagccaaaaaaggtttcgatattgaacaacgcggctttctgcgcaaatttcggccccgcctggtgagttgcgtcttcaagcaccacgccgaaatactccagaaaaaagccgtcgcgtagcgtgctttcgacgcagacgttggtagcgatgccggtgaaaaccagatggcgtattccgcggctgcgcaaaatgctgtccagcggcgtattgaagaaaccgctgtagcgcggcttcggcagcacaatatcgccaggctgcggcaccagttcatccaccagttgataatcccaggagcctttcgccagcaatttcccctgcagctgcggctgcttacgcatggttttcagggcgttgcttttatgaaaattcggactgccgggtccgccagcctcgacatactgttcatcccagccattttgaaaccagatgatcagcatccctgccgctcgcgctgcggtcacggcggtttgaatgttggcaatgaccgggcgagtggtactgacatcaaacccggcgagatctaagtagccgcctggcgtggcataagcgttttgcatatccaccacgatcagcgcactttgctgcggatcgaaggtaatggcttccggtcgagcggttaaggtcgtcatcatgccacctcctgagtcagcgcaggtagatgggcgcggcattgcatcagtggttgaatgcgctcgccgaaggtttcgattccgctcagaaaatcgtcgaaggttaacagcacgccttcggcaccaggcacgcttgcgacttcatctaacatgcgcgcgacactggcgtaagaaccgactaacgtccccatattgatgtttaccgcgctagtgggatcggccatctgacgaacgttggtgtcagtaccggagcgggtatctttctgactttgttcggttagccagcttaacgcctcttcatccgcgcccgctttgtagtgttcccatttggcgcgagcggcatcgtcggtttcatcggcaatcaccataaacaacacataagagccaacgtcgcgtccggtttgctctgcggcctgtttcatccgcgcagcggtcggggcgaaagccgtgggtgtatttacgcctttgccgaaacagaagttgaaatcggcataccgggcggagaacgccatgccagcgtcgctttgcccggcgcagatcactttcatggggacactcggttgcggactcacgcgacaatcattcatggtgaaaaaatcgcctttaaaatcgcttttccccgtgccccacaggtcgcgcagcacctgaacatattcggtgagatagtcgtaacgacgggagaaatagtcatcgccaggccagatacccatctgctcatactcgggcttttgccagccagtcacgaggttgacgccaaaacgcccgccagagatggagtcgatggttgcggccatacgggcgacgattgccggaggtaacgttaaggtggcagcagtggcgtaaatctgaatgcggctggtcacggccgccagccccgccatcaaggtgaagctctcaaggttgtgatcccagaactcagttttgccgccaaagccacgcagtttgatcatgctcagggcgaaatcgaaatggtagtgctccgctttttgcacaatggctttattcagttcaaaggtcggcatgtactgcggcgcgtgggtgctaatgagccagccgttgttgccaataggtacgaatacgccaattttcatcatcaacctctcttcgtctcgtaaagtgaaagtcagacggggcgctgcatcctgcatatccttttcagccgcgtattggcttgtttgcaaagcggatgccagtttttaaaaagttaatgttattaatctgttaacattacgttatctaaaatatctggtaaaaagtggactaaacggtcaaaacagttgcacataaaacatgcatctgtgcgcgatgagagtgcagaaggtcgaggccgggcgggggttttgctatcctgttgccaatctacaagaggggagagcgcatgacgcaaggcgcagtgaaaacaacgggtaaacgtagccgcgcagtaagcgcgaagaaaaaagcgattcttagcgcagcactggacacttttagtcaattcggttttcacggcacaaggctggagcagatcgcagagttggcgggtgttagtaaaaccaatctgctgtattactttccgagtaaagaggcgctgtatattgccgtgctgcggcagattctcgatatctggctggcaccgttaaaagcgtttcgtgaagatttcgccccgctggcggcgatcaaagagtacatccgtctgaagctggaagtcagtcgcgattatccgcaggctagtcgcctgttctgtatggagatgctggcaggcgcgccgctgttaatggatgaactgacgggcgatttgaaggcattaattgatgagaaaagcgcgctgattgccggttgggtcaaaagcggcaaactcgcgccgattgatccgcagcatttgatttttatgatttgggcttccactcaacattacgccgatttcgcccctcaggtggaggcggtgacaggcgcgacgttgcgcgatgaggtatttttcaatcaaacggttgaaaacgtgcagcggattattattgaggggattcgaccacgttaaagatgccggaggaggttgtaacatcctccggctacctgtttaacctatagtcattaagctggcgttaccgccagcggcagcggtattcacactcaggctacgctcgatatacagccgttccagaaggatattgctttcgccacgggcaaaaccctgcacgctaacaattgtgccatcccgcgcggcaactgcttcacacaatgcgcgaagctgatcgctatcaccgtggaagatcaccgcatcaaacggttgagcggttatattttccgctttcgccagttgaatacgttcgctgactgcgcttggcaatgccttcactaactgacgatgcagcgcgtcatccggccacagtacctggctgcccaccgccagcacggcggcgagctgagtcagcgcatcctgctcatcatcggcaatacacaacacgcgctcacgcggcagcagcgtccaggtgttgcgttcacccgtcggccccggcagcaatcgttgtgttcctgcctgcgccagctcgccatattgcgtacataacgcctgcaattctggacgatttgctgcccattcccgcagtgcatttagcggctgagtcaatgcggctttcaactgcgcatcgaccggatactttgcatcctgacgcgcgagcgtcactgccagcgcactttccgggcgattcgccagcagacggtagagatagagcggaccgcctgctttcggcccggtaccggacaacccttcgccgccgaacggctgcacaccaaccactgcgcccaccatattacggttaacatacaggttaccaacatgggcgctgccagtgacctgggcgatggtttcatcaatgcgcgtatggacgccaagcgtcagaccataaccggaagcgttaatctgctcgatcagctctggtagctggttacggttgtaacgcaccacatgcagcaccggaccaaagacctctttttgcaattcggcaaagtcatccagttcgatcagcgtcggggcgacaaaggtgccgctttgccattcacgggcatcttcgctgttttcccgcaccgcctggaacaccggacggcctttgctacgcatggtctgaatatggcgctcaatattggctttcgcttcgctatcaatcactggaccgatatcggtggtcaggcgacccggattacccatccggcattcggccattgcgccgcgcagcattttcaacgtgtggtcggcaatctcatcttgcaggcacagcacgcgcagcgcgctacaacgctgacccgcactgtcgaacgcgctggccagtacatccacgacgacctgttcggtcagtgcactagaatcgacaatcatcgcgttcatgccgccggtttcagcgatgagcggaatagggcgaccctgagcgtccaggcggctggcgatattgcgctgcagtaacgtagcgacttcggtactaccggtaaacatcaccccgcgcacgcgatcatcacccgtcagttgcgcgcccacggtttcaccccgacctggcagcaattgcaccacgcctggcggtacacccgcttccagcaaaatggcgatcccttgcgcggcaatcagcggcgtttgttctgccggttttgccagcacgctgttacctgccgccagtgcggcggcgatctgcccggtgaaaatagccagcgggaagttccacggactgatacacaccacaggccctaatggacggtgggtttcgttagcgaaatcatcccgcacctgtccggcgtagtagtggagaaaatcgaccgcttcgcgcacttcggcaatggcgttactgaaggtttttccggcctcacgcaccagaataccaatcagttgctgcatctggctttccatcagcacggcagcgcggtgcaaaatcgctgcgcgttcagccggaggcgtggcaaaccagattggcgcgttattaaccgcactttccagcgcctgttctacttcacgcggcgtggcttcacgcacatagcccacaatatctttcggttccgcagggttaataacggggctcatctcacctgccgctaccggttgttccagcattggcaaggcctgccatttttgcagtgcactattgagcagggcagaggagaggctggccaggcggtgttcgttagcgagatccagccctgcgctgttgtcgcgcccgtgaccgtaaagatcgcgcggcaggggaattttcggatgcggtaatccagtttgcccttcctgttgcgccagtttttctacagcagtgaccggatcggcgaccagttcatccagtggcaaagaggtgtcggcaatacggttaacaaagctggtgttagcaccgttttccagcaggcgacgcaccagatacgccaacagcgtttcatgtgtgccaaccggagcataaatacgacacggacggttaagtttgccgtcggcaactttcccggggacctgctcatacagtggctcgcccataccatgcaggcactggaactcgtactgacccgggtagtagttctgccccgccagttgataaatcgccgccagcgtatgggcgttgtgcgtcgcgaactgcgggtagattagattcggcaccgccagcagctttttcgcacaggcgagataagaaacgtcggtatacaccttgcgggtataaaccggataaccttcaaggccgtccatctgcgcacgcttaatttcactatcccagtacgcgcctttcaccaggcgaatcatcagacggcgacggctgcgggtggcgagatcaatcaggtaatcgatcaccaacgggcagcgtttttgataagcctgaataacaaaaccgatgccgttccagcctgccagttccggctcgaaacagagtttttccagcagatcgagggagatctccaggcgatcggactcttcggcgtcaatgttgataccaatatcgtactgacgcgccagcagggtgagacttttcagacgcgggtaaagctcttccattacccggtcatactgggcgcggctataacgcggatgcagcgcgctcagtttgatactaatgcccggcccttcatagatgccacgaccgttagacgctttaccgatggcgtgaatcgcctgctgataggaaaccatatacgcctgtgcatctgcggcggtcagcgcggcttcgcccagcatatcgtaagagtaacggaaacctttctcttccagcttgcgggcattggctaacgcttccgcgatggtttcgccagtgacgaactgctcacccatcaggcgcatcgccatatccacacctttgcggatcagcggttcaccgcttttaccgataatgcggttcaggctgcgggagaggctggcttcgttatgggtggaaaccagtttgccagtaaacagcagcccccaggtggcggcattaacaaacagactcgggctacgaccaatgtgactctgccagttaccgttgctgattttgtcgcgaattaacgcgtcgcgggtggctttgtcgggaatacgcaacaacgcttccgccagacacatcagcgccacgccttcctggctactcaggctaaactcctgcaataacccctggaccatacctgcgcgaccactggcatttttttgattacgcagtttatcggccagctgatacgccagtttgtgcgcctgttcagcaactggctgcggcaggcgggcttgttccagcagcatagaaaccgcttcggtttccgggcggcgataggccgcggtgatcgcggcgcgggaaacgctctggggcaatatttgctcggcaaagtcgaggaatggctggtgtggttcctctgccggagtcggtgcttcatcgctctcattggccgcgccagaaagcagcgcaggtagctccggcagagtatcgctgttttccagttgttcgagataagaaaaaatcgcctgcttaattaaccagtgtggtgtgcgatcgatacgtgtcgcggcagacttaatacgctcacgcgtcgcgtcgtccagcttaacccccatggtggtggttcccatgccattactcctgttgttcagaaaggtgcaacttaacgttatcgtgaaatatccatgatgttgcaactttgtgcaaccatgttaaatgtgacatgcgtagcaagcttaaaaatgaatgaaatgttaataaaagaaatcgatatgacagggattaaaaaaataactcagactttttctctgcggcagttaacatttttgaaaggtgcaaccgcaaaaaatgtgagagagtgcaacctgatgaaaaatagtgtcgctgagcactaaaatttaatgtaaatggtgtgttaaatcgattgtgaataaccagcgcttccggcaggatacggtcgccctggtaaaacataaactctgttaccccgttccggtggcagatataacggcaagtttcgacattgccgataataattttttggagactttagatggctattagcacaccgatgttggtgacattttgtgtctatatctttggcatgatattgattgggtttatcgcctggcgaagtacgaaaaactttgacgactatattctgggcggtcgtagtcttgggccattcgtgacggcattaagcgcgggtgcgagcgatatgagcggctggctgttaatggggttgccgggcgctgtttttctttccgggatttccgaaagctggatcgccattggcctgacattaggcgcgtggattaactggaagctggtggccgggcggttgcgtgtgcataccgaatacaacaataacgccttaacactgccggattatttcaccgggcgctttgaagataaaagccgcattttgcgcattatctctgcgctggttattttgctgttcttcaccatttattgcgctagcggcattgtggcaggcgcgcgtctgtttgaaagtacctttggcatgagctacgaaacggctctgtgggcgggcgctgcggcgacgatcctttacacctttattggcggtttcctcgcggtgagctggactgacactgtacaggccagcctgatgatttttgccctgatcctgacgccggttatcgtcattatcagtgtcggtggctttggtgacagcctggaagtgatcaaacaaaagagcatcgaaaacgttgatatgctcaaaggtctgaactttgttgccattatcagtctgatgggttgggggctgggttacttcgggcagccgcacattctggcgcgttttatggcggcggattctcaccacagcattgtccatgcgcgtcgtattagtatgacctggatgatcctctgcctggcaggggcggtggctgtcggcttctttgggattgcttactttaacgatcatccggcgttggctggtgcggtaaatcagaacgccgagcgtgtgtttatcgaactggcgcaaattctgtttaacccgtggattgccgggattctgctgagcgcaattctggcggcggtaatgagtaccttaagttgccagctgctggtgtgctccagtgcgattaccgaagatttgtacaaagcgtttctgcgtaaacatgccagccagaaagagctggtgtgggtagggcgtgtgatggtgctggtggtggcgctggtggcgattgcgctggcggcaaacccggaaaaccgcgtgctgggcttagtgagctacgcgtgggcaggctttggcgcggcgtttggtccagtggtgctgttcagcgtgatgtggagtcgcatgacgcgtaacggtgcgctggcggggatgatcatcggtgcgctgacggttatcgtctggaaacagttcggctggctgggactgtacgaaattattccgggctttatcttcggcagtattgggattgtagtgtttagtttgctgggtaaagcgccgagtgcggcgatgcaaaaacgctttgccgaggccgatgcgcactatcatagcgctccgccgagtcggttgcaggaaagctaagggacttagcctgcggcggttttgtttggcttcagcagcgggttgcgctcccttaatgtgcctcgccatataaattgaatggtgcagggagcgcgcagggggcggccaatcgccgccgccccctgctgtcccggccttcggggaacgcttcagcgattttgacgccaccaacacccgagctgttattatgttccgggcaaaaagttagatttgataatcgcggatggacgaaattgcttgatacacccgcttatcagttttacatggaagctctgatgcattgagtctggacagttttgtcggctggatacggcgtttacgcggcatccggcaagaacacatggttctttgcaaacaatcccatctttctaccctggaataatcgtttatatcccttggcattacctctctttgtttacattccaacatcattttataaacattccgcttgtgtttttctttgccgtaatgataatcgctatcactgcgatttacttttctttgcatagattgactcagaaaaacgtttaagggtgggtggcatgtttgttccgtttctcattatgttgcgcgaaggacttgaagccgcgctgattgtcagtttgattgccagctatcttaagcgtacccagcgaggccgatggattgtgtgatgtggattggcgtgttgcttgccgctgcgttgtgcctgggcttgggtatcttcattaacgaaaccaccggcgaatttccgcaaaaagaacaggaactgtttgaaggtatcgtggcggtgatcgccgtggtgatccttacctggatggttttctggatgcgcaaagtgtcgcgcaacgtcaaagtgcaactggaacaggcagtcgatagcgcattgcagcgtggaaatcatcatggctgggcgctggtgatgatggtcttttttgccgttgcaagggaagggctggagtcggtctttttcctgctggcggcatttcaacaagatgtcgggatctggccgccgctgggtgcaatgctcggtcttgctactgccgtggtgctaggcttcctgctctactggggcggtattcgcctcaatcttggtgcattttttaaatggaccagcctgtttattctcttcgtcgccgcagggctggcagctggtgccattcgcgcatttcatgaagccggattgtggaaccactttcaggaaatcgccttcgatatgagtgcggtgctctcaactcactcgctgtttggcacgctgatggaagggatttttggctatcaggaagcgccgagcgtcagcgaagtcgccgtctggtttatttatctcatcccggcgctggtggcatttgctctgccaccacgcgcaggggcgacagcgtctcgctccgcgtaacaaatacgacgcaaactcttgcttagttacaacatactttaaagggatagtctcgtcatgaccattaacttccgccgtaacgcattgcagttgagcgtggctgcgctgttttcttctgcttttatggctaacgccgctgatgtgccgcaggtcaaagtgaccgtgacggataagcagtgcgaaccgatgaccattacggttaacgccgggaaaacacagttcattattcagaaccacagccagaaggcgctggagtgggagatcctcaaaggcgtgatggtggtggaagagcgggaaaatatcgcccctggctttagccagaaaatgacggcgaatttacagcctggcgaatacgatatgacctgcggtctgctgactaacccgaaagggaagttgatcgtcaaaggtgaggcaacggcggatgcggcgcaaagtgatgcgctgttaagtcttggtggtgcaattactgcatataaagcgtatgtcatggcggaaaccacgcagctggtgaccgacaccaaagcctttaccgacgcgattaaagcaggcgatatcgaaaaagcgaaagcactgtatgcaccgacgcgccagcactatgagcgtattgaaccgattgctgaactgttctccgatctggatggcagcattgacgcccgtgaagatgattacgagcaaaaagccgccgacccaaaattcactggtttccaccgtctggaaaaagcattgtttggcgacaacaccaccaaagggatggaacagtacgctgagcagctttataccgatgtggtcgatttgcaaaaacgcatcagtgaactggctttcccacctagtaaagtggtcggcggcgcagccggactgattgaggaagtggcagccagcaaaattagcggtgaagaagatcgctacagccacaccgatctgtgggatttccaggctaacgttgaaggcagccagaaaattgtcgatttgctgcgtccacaactgcaaaaagccaacccggaactgctggcaaaagtcgatgccaactttaaaaaggtcgataccattctggcgaaataccgtactaaagacggttttgaaacctacgacaaattgaccgatgccgaccggaatgcactgaaaggaccgattactgcgctggcggaagatctggcgcaacttcgcggtgtgctgggactggattaagcgttatgcagtataaagatgaaaacggcgtgaatgaaccgagtcgccgacgtttactgaaagtgataggtgcactggcgctggcgggaagttgtccggtcgctcatgcacaaaaaacgcaaagtgcgccgggtacgcttagtccggatgctcgcaatgagaaacagccgttttatggtgagcatcaggcagggatcctgacgccacaacaggccgcaatgatgctggtggcgtttgatgtgcttgccagcgataaagccgatcttgagcggttgtttcgcttgttgactcagcgttttgcttttctgactcagggcggagcagcaccagaaacgccaaatccgcgcctgccaccactcgattccggcattcttggcggctacattgcgcccgataatctcaccatcacgttaagcgtgggtcacagtttgtttgatgagcgctttggccttgcgccacagatgccaaaaaagctgcagaagatgacgcgtttccccaacgacagcctggatgcggcgttatgtcatggtgatgtgttgctacagatttgcgccaacacccaggacacggttatccatgcgctgcgcgatatcatcaaacacacgccggatttgctcagtgtgcgctggaagcgggaagggtttatttccgatcacgcggcgcgtagtaaaggcaaagagacgccgattaatttgctgggtttcaaagacggcactgccaatcccgatagccagaatgataagttgatgcaaaaagtggtgtgggtaacggcagatcagcaggagcctgcgtggacaatcggtggcagctatcaggcagtacgcttgattcagtttcgagtggaattttgggacagaacgccgctgaaagaacagcagacgatttttggccgtgataagcaaaccggtgcgccgctgggaatgcagcatgagcatgatgtgcctgattacgccagcgacccggaagggaaggtgatcgcgctggacagccatatccggctggcgaatccccgcacggcggagagtgagtccagcctgatgctgcgtcgtggctacagttatagtctgggcgtcaccaactccgggcaactggatatggggttgctgtttgtctgctaccaacacgatctggaaaaaggcttcctgacagtacaaaaaaggctcaatggcgaagcgctggaggaatacgttaaacctatcggcggcggttatttttttgcgctgccgggggtgaaggacgcgaacgattatttcggaagcgcgttattgcgggtttaatgtttttaggcggataaggcatttgtgcgcagatgcctgatgcgacgcttgcgcgtcttatcatgcctacaatcagtgcgggtttggtaggctggataaggcgttcacgccgcatccggcgatcgtgcactgatgcctgatgcaaatcctgctgaaagcacacagcttttttcatcactgtcatcactctgtcatctttccagtagaaactaatgtcactgaaatggtgttttatagttaaatataagtaaatatattgttgcaataaatgcgagatctgttgtacttattaagtagcagcggaagttcccggcagtgatagtcagtcactatggagatcgcggatggtaacgtcctgtactggacatgttttagataatcaacgcgccaccactcgcggagttttctcctccggtagtcatctcgtcactttgcattttcaacctcatcctttctttagttgtgttaccgacgccgtaaacggtgcgcgtagccgttttagcgcattttatccaaaagcaaactatggcttacaaggaagccaaccctctgatgttcgtgcgcataatcgcgctgccaacggcgcgtgtgatgaatacaaacaactcaaggtgctctccatgggaagacaaaagcagtgatcaaagctcgtcgcgaggcaaaacgtgtgctgagacgggatagccgcagccataagcagcgtgaagaagaaagcgtcaccagccttgtgcagatgggcggcgtagaagccattggtatggcccgcgacagtcgcgatactagccccatcctcgcgcgaaatgaagcgcaattgcactatctgaaggctattgagagtaagcagctgatattcgccacgggcgaagccgggtgcggaaaaacctggatcagcgcagcaaaagcggcagaggccctgatacataaggatgtcgacaggattatcgtcacccgtccagttctgcaagccgatgaagatcttggcttcttacctggagatatcgcagaaaagtttgctccctattttcgcccggtctacgacgtgctggtccggcgcttaggggcttcctttatgcagtactgcctgcgaccggaaatagggaaggtggaaattgcgccgttcgcctatatgcgtggacgtacctttgaaaatgcagtcgtcattcttgacgaggcgcagaatgtgactgccgcgcaaatgaaaatgtttttaacccgcctcggggagaacgtgacggttatcgtcaacggtgatatcacgcaatgcgatttgcctcgcggcgtgtgctccggattaagtgacgcgctggaacgtttcgaagaagatgaaatggttgggatcgtccggttcggtaaagaggactgcgtacgtagcgcactttgccaacgtacgctgcatgcctacagttaagtgtgttatcggtgcagagcccgggcgaaccgggctttgttttgggtgttcccggtgtgtgcaatatacgaaaaaaaagcccgtactttcgtacgagctcttctttaaatatggcggtgagggggggattgactcgcttcgctcgccctgcgggcagcccgctcactgcgttcacggtctgtccaactggctgtcgccagttgtcgaaccccggtcggggcttctcatccccccggtgtgtgcaatatacgaaaaaaaagcccgtactttcgtacgagctcttctttaaatatggcggtgagggggggattcgaacccccgatacgttgccgtatacacactttccaggcgtgctccttcagccactcggacacctcaccaaattgtcgttcctgtcttgctggaacgggcgctaatttagggaaatcatgacctgaggtcaacaaactttttgaaaaaatcgcgcgtttattcaaacttcaatcaatgtgtggttttaataagcgaaatctgctttttttgccaccgaccacggatttgttatgctggtggcctttgtagatcataacgataagtgcgaataaatttcgcacaacgcttttcgggagtcagtatggatatcatcttttatcacccaacgttcgatacccaatggtggattgaggcactgcgcaaagctattcctcaggcaagagtcagagcatggaaaagcggagataatgactctgctgattatgctttagtctggcatcctcctgttgaaatgctggcagggcgcgatcttaaagcggtgttcgcactcggggccggtgttgattctattttgagcaagctacaggcacaccctgaaatgctgaacccttctgttccactttttcgcctggaagataccggtatgggcgagcaaatgcaggaatatgctgtcagtcaggtgctgcattggtttcgacgttttgacgattatcgcatccagcaaaatagtagccattggcaaccgctgcctgaatatcatcgggaagattttaccatcggcattttgggcgcaggcgtactgggcagtaaagttgctcagagtctgcaaacctggcgctttccgctgcgttgctggagtcgaacccgtaaaagctggcctggcgtgcaaagctttgccggacgggaagaactgtctgcatttctgagccaatgtcgggtattgattaatttgttaccgaatacccctgaaaccgtcggcattattaatcaacaattactcgaaaaattaccggatggcgcgtatctcctcaacctggcgcgtggtgttcatgttgtggaagatgacctgctcgcggcgctggatagcggcaaagttaaaggcgcaatgttggatgtttttaatcgtgaacccttaccgcctgaaagtccgctctggcaacatccacgcgtgacgataacaccacatgtcgccgcgattacccgtcccgctgaagctgtggagtacatttctcgcaccattgcccagctcgaaaaaggggagagggtctgcgggcaagtcgaccgcgcacgcggctactaataaagcatcaggattcctgctatccttggcgggaattgaatacaggagagagttatgtatcccgtcgaccttcatatgcataccgttgccagcacacatgcatatagcacattaagtgattacattgcccaggccaaacaaaagggcattaaactttttgcgatcaccgatcatggcccggatatggaagatgcgccgcatcactggcacttcattaacatgcgtatctggccgcgagtggttgatggggtagggatcctgcgcggcatcgaagctaacattaaaaatgttgatggtgaaattgactgcagcggtaaaatgtttgacagcctggatctaattattgccggttttcatgagccggtttttgcgccacatgataaagcgaccaatacacaagcgatgatcgccactatcgccagcggcaatgtgcatataataagccatcccggaaatcccaaatatgaaatagatgtgaaagccgttgctgaagcagccgcgaaacatcaggtggcgctggaaatcaataattccagttttttacacagtcgtaagggcagtgaagacaactgtcgtgaggtagccgcagcggtacgtgatgctggaggttgggtggcattaggcagcgattctcacaccgcgtttaccatgggggaatttgaagagtgtcttaaaatcctcgacgcggtagattttccgccagagcgcattttgaatgtttctccgcgccgcttactgaacttccttgaatctcgcggtatggcaccgattgcggaatttgcagacctttaattactagtaatggaaatatattaatgaacgagttttctatcctctgtcgtgtgctgggtagcctctattaccgccaaccacaagatcctttactggtgccgctgtttaccctgattcgtgaggggaaactggctgcgaactggccactggagcaggatgagttgctgacacgtttgcagaaaagctgtgatatgacgcaagtctctgccgattacaatgcgttgtttatcggcgatgaatgtgctgtgccgccatatcgtagcgcatgggttgagggcgcgacggaagcggaagtgcgcgcttttctttctgagcgagggatgccattagcggatacgccagccgatcacatcggcacattgctgctcgcagcttcctggctggaagatcagagtacggaagatgagagcgaagcactggaaacactgttcagtgagtatctgttaccctggtgtggtgcgttccttggcaaagtggaggcccatgcaaccacgcctttctggcgcaccatggcaccgctaacccgcgatgccattagtgcaatgtgggacgagctggaagaagattctgaagaataagtgtgatctacgtcactcataactgcaacggataatttgttgttgcataaaatgtgtgctcgatctcattcatggccgcgttttctgctatcatgcgcggcatgaacatacttctctctattgcaatcacaacaggcattctctccggtatctggggatgggtggctgtttccctgggcttactaagctgggcgggcttcctgggctgtacggcctactttgcctgcccgcaaggtgggctgaaagggctggcgatctccgctgcaaccctgcttagtggcgtggtgtgggcgatggtcattatttacggtagtgcactggcaccacatctggaaattctcggttatgtcataaccggtattgtcgcgtttctgatgtgtattcaggccaaacagctgctgcttagttttgttccggggacgtttataggcgcatgcgcgacgtttgccgggcagggtgactggaaactggtgttacctagcctggcgcttgggctgatatttggttacgcaatgaaaaacagtggcctgtggctggcggcgcgtagtgcaaagacggcgcaccgtgagcaggaaatcaaaaataaagcgtgaggggcactcacgctttcgcttaaacagtaaaatgccggatgataattccggcttttttatctgtcaggattccggtggaacgctcatatggcggtatttcaccagaatgtcattctgccgttctgctttattttgcaaatcccacagaccacggtcgataccatcattaatcaggaaaatgacccctgtttcgatagcgctcatcaggcacagcataacaggttcgttgctggtgtaacccacttccccttcaagcaagcgctggtagtcaataaagcggaaaaccccggcctgaacttcataggaaagtatcgtcttactggtgttcacgctagaaaggatctcgccggtactcacattgacgacgcgcaggttcacggcaatctgatcgagctggtattgcgtgtcggcaccgatgccaaaatatcttgccccaaccccgccagatttgacgttgctttcataaccgataatgctaccttcaaccatgatatttgccgccgttaaagattgcagcgggattcggttattaatggcaaccgtgccgttttcttgtgccgcacgaataatcttgcgctcgttaagcaggttttgtaagccctggcgctccagcggtataaaccagcgagaatctttcagtgccgtgaccagcattgccgtggcgctttgcggaacagcagtggagaagttacttgccgggtagggtttaaattgcccggtttcgtcctgaatgttgtatacgctaacaaagattttacccgtcggcgctggcagatgggtcaaatctttgtagctctgagcacgaggcattaatgtcggtctggcggcttctttaggcggggcggttaagcatccgctcagtaacatgacggcaaccaaaagaaataagcgctgcatgattattttccttatgaagctggggcttaaaaatcggtactgttattttgtaaaccgctaacctggatggtgctggtttgtccggttttacgatctgtcacgttcaactgcaattgaccatcgcggttggcaatatcgacaatataatcgttggtcaccatgcggcccggtttaccggtattaatattgctcagtagcccacctaaaatttgactctggatggcctgagtaaagttatctaacgcactgggtgtttcaataccaaagtcatcgttatagctcggatctttataagagttttgggcctgagcgctatttaataaaaaagcgccattatttgggttaccaccaaagtttggattacggaactggaaagtcatggttccagcccaacttaatgggctaataagcatgagtagaactactgcatgtttgacacgcattgcagcctccgaacaattttttatttagaattcatcatgcgccaaatcgcccgtacttaataacgcctgatttatctggcgacgatttagtgcttcttcagtttgaatcagtgcaaagacgacagttttctcgaagtctcttttcaacggaaataaaaaagtctggaaaataacgtcctgattgaccgttatagtgatccagcttccccatcgtgcactgggcctttcattaatcgttaagttacccgtatagtcactttcccatttatcactaaaggctcggtaaaaatcatggccaatagaactaacagtatggtcagttagcaatcccgggacttctacctcaacggcgtgaagattccctgcggcgaacagaaattctgccgccacaatccagcgtaaataacgtttcatggctttatcgcctgaggttatcgtttgcccaggaaaccgcttgtgtccggttttttacggctatcttcttgaaaagattataaagatgcgttttaaccgtattttcgctgatgaacaagctacgagcgatctcgttattagacgcgccgatacgcagcttattcaggatctctttttcccgatgagtaaggagggcactttccgtgctgttataacgatagttaccactatgcgtaatcaggtagctggcaagcttttgcgtaaagtagcattcgccgcgcaggacgccttgcaacccattgacaacacgttcttgatcctccatggaataaaaaacgccgttgatatgaggccagttttcaatgtcgcggtacgggtaatcttcaggcgtatttagcaacaatattttgatattgttgtttttcctgctcaaagtatcctgccaataatggataagctttttatccgcttccatcatatccagaagaataatagagccactagagatatcgtccagagaacgttgaatattatgtaattttcctgtaattgccaggctttgtttaaggtgctgcaagagagctgtcgcctgcaaagaagatttagtgatcaacaataatgtatgaccatgaatactatggacttcattaaacatgatgaaaccccgctttttttattgatcgcacacctgacagctgcctctaaaatagaagcaccagaagtactgacagatgttgcactgctgtgtgtagtaataaatcagccctaaatgggtaaaatataaaactaatggattacatctgatttcaatctagccattacaaatcttaaatcaagtgttaaacatgtaactaaatgtaactcgttatattaaaatgttaaccttaaggttttattaagtttagaaatgatagaaaagttgtacatttggtttttattgcacaattttaaaaaatcatacaaatggtgataacttactaataatgcatataaaaaatatttcggtgtagtcctttcgtcatgtaaaacgttcttgttttttctccacacctccgtggacaattttttactgcaaaaagacgaggtttgtcacggcttgtgcgcaagacatatcgcagcaatcagcgacgggcaagaagaatgactgtctggtgctttttgatagcggaaaacggagatttaaaagaaaacaaaatatttttttgcgtagataacagcgtatttacgtgggttttaatactttggtatgaactaaaaaagaaaaatacaacgcgcgggtgagttattaaaaatatttccgcagacatactttccatcgtaacgcagcgttaacaaaatacaggttgcgttaacaaccaagttgaaatgatttaatttcttaaatgtacgaccaggtccagggtgacaacatgaaaaacaaattgttatttatgatgttaacaatactgggtgcgcctgggattgcagccgcagcaggttatgatttagctaatagtgaatataacttcgcggtaaatgaattgagtaagtctagttttaatcaggcagccataattggtcaagctgggactaataatagtgctcagttacggcagggaggcagtaaacttttggcggttgttgcgcaagaaggtagtagcaaccgggcaaagattgaccagacaggagattataaccttgcatatattgatcaggcgggcagtgccaacgatgccagtattagccaaggtgcttatggtaatactgcgatgattatccagaaaggttctggtaataaagcaaatattacacagtatggtactcaaaaaacggcaattgtagtgcagagacagagccaaatggctattcgcgtgacacaacgttaatttccattcgacttttaaatcaatccgatgggggttttacatgaaacttttaaaagtagcagcaattgcagcaatcgtattctccggtagcgctctggcaggtgttgttcctcagtacggcggcggcggtaaccacggtggtggcggtaataatagcggcccaaattctgagctgaacatttaccagtacggtggcggtaactctgcacttgctctgcaaactgatgcccgtaactctgacttgactattacccagcatggcggcggtaatggtgcagatgttggtcagggcagtgatgacagcagtatcgatctgacccaacgtggcttcggtaacagcgctactcttgatcagtggaacggcaaaaattctgaaatgacggttaaacagttcggtggtggcaacggtgctgcagttgaccagactgcatctaactcctccgtcaacgtgactcaggttggctttggtaacaacgcgaccgctcatcagtactaatacatcatttgtattacagaaacagggcgcaagccctgttttttttcgggagaagaatatgaatacgttattactccttgcggcactttccagtcagataacctttaatacgacccagcaaggggatgtgtataccattattcctgaagtcactcttactcaatcttgtctgtgcagagtacaaatattgtccctgcgcgaaggcagtagtgggcaaagtcagacgaagcaagaaaagacccttagtttgcctgctaatcaacccattgctttgacgaagttgagtttaaatatttccccggacgatcgggtgaaaatagttgttactgtttctgatggacagagtcttcatttaagtcaacaatggccgccctctagtgaaaagtcttaatttgttgaaatatcgagcataagatgaatctggagagaatggtctgctgcgaatcagccaacctgaaagtatggataacacaaccctcaaggatgactaatcattgaggaaatagaataaatgttcagaccttttttaaactctcttatgctcggcagtttgttttttccttttattgccattgctggaagcaccgtgcaagggggcgtgatccatttttatggccaaattgtggaaccggcatgtgacgtcagcacccagagtagtcccgtagaaatgaactgcccacagaatggttctattccgggcaaaacctactccagcaaagcgttaatgagcggcaatgtcaaaaacgcgcaaatagccagtgtaaaagtgcagtatcttgataaacagaaaaagctggctgtaatgaacatcgaatataactaagtttctgaacaactcacgttgctgagcagaaaaatgcgatttaaccaaaaagcctgctgtacacttaagaaacaagaaggtgtaaggaggcgttatgaaaacgcgtattcatgttgtgcagggtgatattaccaaactggccgttgatgtgattgtgaatgcggctaatccgagtttaatgggaggcggcggcgtcgatggggccattcatcgcgcagcgggtccggccctgctggatgcttgtttaaaagtcaggcaacagcagggcgattgccctacggggcatgccgttattacgcttgcaggcgatcttcccgctaaagccgtagtgcacaccgtcgggccagtctggcgtggtggtgaacaaaacgaagaccagcttttgcaggatgcctatctcaatagcctacgactggtggcggcaaacagctatacgagtgtggcttttcctgcaatcagtactggggtttatggttaccctcgtgcggcagcggctgaaatcgcagtaaaaaccgttagtgaatttattacccgtcacgctttacccgaacaggtatactttgtctgttatgatgaagaaaacgcccacctctacgaaagactccttacccaacaaggagatgaatgatttgccccggctggcgagcgcggtgctgccactgtgtagccaacatcccggtcagtgtggcctttttcctctggagaaaagtctggatgcgtttgccgcccggtatcgtctggccgaaatggcagagcatacgctcgatgttcagtattacatctggcaggacgatatgagcggtcggttactgttttccgccctgttagccgcagcaaagcgtggcgttcgcgtccgtttgttgctggacgacaacaatacgcccggacttgacgacattttacgcttgcttgacagtcatccacgcattgaagtccggctttttaatcctttcagctttcgcttgctgcgtccgcttggttatatcaccgacttttcccgtcttaatcgccgtatgcacaataaaagtttcactgtcgatggcgtggtgaccctggtgggaggacgaaatattggtgatgcctattttggagcaggggaggagccactttttagcgatttagatgtcatggcaataggacccgtggtagaggacgttgccgatgatttcgcccgctactggtattgcaaaagcgttagtcccttacagcaggtgctggatgtcccggagggtgaaatggcggatcgcatcgagttacccgcctcctggcataacgatgccatgacgcatcgttatttacgcaaaatggaatccagtccatttataaatcatctggttgatggaacattgccgcttatctgggcgaagacacgtttattaagtgatgatccggcgaaaggggagggcaaggcaaaacggcatagtctgttaccgcagcgcctgttcgatatcatgggcagtcccagtgaacgcatcgatattatctcttcctattttgtaccgacacgcgcaggtgtggcgcaactcttacggatggtgagaaaaggggtaaagattgcgatcctaaccaattctcttgccgctaacgatgttgctgtcgtccatgccggatacgcgcgctggcgcaaaaaattgctccgctatggcgtggaattatatgaactcaagccgacgcgtgaacaaagtagtacgttacacgatcgcggcataaccggtaattccggagccagcctgcatgctaaaacctttagcatcgatggtaaaacggtgtttatcggctctttcaatttcgatccgcgtagtacattgctcaatactgaaatgggcttcgtgatagagagcgaaacgctggcacagttaattgataaacgctttattcagagccagtatgatgcggcctggcagctccgtctggacaggtggggacggatcaactgggttgatcgtcatgcaaagaaagagattattctcaaaaaagaacccgccaccagtttctggaagcgggttatggtcagactggcgagcatattgcccgtggaatggttattgtaaatgtggcttaacgggctggtgctttatcgttctcacgcttaacaaccggtttaccagagaacaaaaacttcagtaacgggatgcgcaaatgaatttcatacagaattatcgcaatccctactacaaatatcaggccacagagaaaaccaagccagttggaggtgatgtgcggtgtaatgtatgcgccgaaaaacagcgttaacgggtggtgaaccagatagataaacaggcttgcgttaacaaaataagtcacccgcgcactctggaagttaagcaaacggtggccaaaggagaagaccacattcaccatccacagaccgaggaccatggtgatcacgctctcggtttcgtacatccaggcatcgccactgccatagcgctggttgagtaaataagcgacaaacgccaatgctgctgcaagggtacagccacgagacggcgtggtaaacaaggctttaagatgagggaaaatgaaagccagtgcgccgaggataaagaacggcaaataaaacagcgtttgcatgacaataaaattgaacatgccattactcagaatgggcggatacacaataaaaatcgttcttcttattaccgcataaccgatgccgaggcataaaaaaatcacgcttagttttaccatgctgaattttttattcgttttatcagaattttctaaattatttctgatgcgcttaaatatccatacgcacagcgtcgtcatgaccactaacaccagtaaaaaccacaggtgacttattaattcccaggccaacgtattatatttgtcatacaaactcagcccaggccaactttccgcttttcctttgacatattgcagcataataaattgcggtaatgtcagtagggggatggctgttaacatcgggatacctacacgttcgacacgtactttccaccattttttcaagggatagcgtaaaaaaagcatgtaggaaaagtagccggatataacgaaaaatacctgcatgcggaagctgtggatgaagtcattaaaaagggtcagccacaaactactttcggcgctattcacatgccatgtatggctgctatagattaaagaaatatgaaaaggtatccctaacaacatcagccaggcgcggatggagtcgaggaaatattcacgttgcgcgggtactgggttcatatatggttaactaatctcggatttttcgtcttatccctgtcgggttatgcctttaggcttgttgccatagtgacaccgacctgaccgcgccaggcgcaggcttcaaggtttttatgcatagcatcatcgctaccactaaccagaatggaagcgtctgtaagacggttgataaataaatttgctggcaaaccctacacgaagtcgatgcttctgtctttaggagaagcacggaaagtgaaaacggttgcaatcaggtgcttaatccatgagccagcgtgctgaacgataccgggattctgttgtcggaatggctggttatccattaaaatagatcggatcgatataagcacacaaagggggaagtgcttactaattatgaaacataaactacaaatgatgaaaatgcgttggttgagtgctgcagtaatgttaaccctgtatacatctagtagctgggctttcagtattgatgatgtcgcaaagcaagctcaatctttagccgggaaaggctacgagacgcccaaaagcaacttgccctccgttttccgcgatatgaaatacgcggactatcagcagatccagtttaatcatgacaaagcgtactggaacaatctgaagaccccattcaaactcgagttctaccatcagggtatgtacttcgataccccggtcaaaataaatgaagtgactgccaccgcagtcaaacgaatcaaatacagcccggattatttcactttcggcgatgttcagcatgacaaagatacggtaaaagaccttggctttgccggttttaaagtgctttacccgatcaacagcaaagataaaaacgatgaaatcgtcagcatgctcggggccagctatttccgcgtgattggtgcaggtcaggtttatggcctttctgcccgcggcctggcaattgataccgccttgccaagcggtgaagaatttccgcgcttcaaagagttctggatcgagcgtccaaaaccgactgataaacgtttaaccatctatgcattgcttgacagcccgcgtgcgacaggtgcttacaaattcgtggttatgccagggcgtgacacggttgtggatgtgcagagcaaaatctatctgcgcgataaagtcggcaaactgggggttgcaccgttaaccagtatgttcctgtttgggccgaaccaaccgagccctgcaaataactatcgtccggagttgcacgactctaacggtctctctatccatgccggtaatggcgaatggatctggcgtccgttgaataacccgaaacatttagcggtcagcagcttctccatggaaaacccgcaaggctttggtctgttgcagcgcggtcgtgatttctcccgctttgaagatctcgatgatcgttacgatctccgtccaagcgcatgggtgactccgaaaggggagtggggtaaaggcagcgttgagctggtggaaattccaaccaacgatgaaaccaacgataacatcgtcgcttactggacgccggatcagctgccggagccgggtaaagagatgaactttaaatacaccatcaccttcagccgtgatgaagacaaactgcatgcgccagataacgcatgggtgcaacaaacgcgtcgtagtacgggggatgtgaagcagagcaacctgattcgccagcctgacggtactatcgcctttgtggtcgattttaccggcgcagagatgaaaaaactgccagaggataccccggtcacagcgcaaaccagcattggtgataatggtgagatagttgaaagcacggtgcgctataacccggttaccaaaggctggcgtctggtgatgcgtgtgaaagtgaaagatgccaagaaaaccactgaaatgcgtgctgcgctggtgaatgccgatcagacgttgagtgaaacctggagctaccagttacctgccaatgaataagacaactgagtacattgccgaagactgatatccgcgccgttcatcaggcgctggatgccgaacaccgcacctgggcgcgggaggatgattccccgcaaggctcggtaaaggcgcgtctggaacaagcctggccagattcacttgctgatggacagttaattaaagacgacgaagggcgcgatcagctgaaggcgatgccagaagcaaaacgctcctcgatgtttcccgacccgtggcgtaccaacccggtaggccgtttctgggatcgcctgcgtggacgcgatgtcacgccgcgctatctggctcgtttgaccaaagaagagcaggagagcgagcaaaagtggcgtaccgtcggtaccatccgccgttacattctgttgatcctgacgctcgcgcaaactgtcgtcgcgacctggtatatgaagaccattcttccttatcagggttgggcgctgattaatcctatggatatggttggtcaggatttgtgggtttcctttatgcagcttctgccttatatgctgcaaaccggtatcctgatcctctttgcggtactgttctgttgggtgtccgccggattctggacggcgttaatgggcttcctgcaactgcttattggtcgcgataaatacagtatatctgcgtcaacagttggcgatgaaccattaaacccggagcatcgcacggcgttgatcatgcctatctgtaacgaagacgtgaaccgtgtttttgctggcctgcgtgcaacgtgggaatcagtaaaagccaccgggaatgccaaacactttgatgtctacattcttagtgacagttataacccggatatctgcgtcgcagagcaaaaagcctggatggagcttatcgctgaagtcggtggcgaaggtcagattttctatcgccgccgccgtcgccgcgtgaagcgtaaaagcggtaatatcgatgacttctgccgtcgctggggcagccagtacagctacatggtggtgctggatgctgactcggtaatgaccggtgattgtttgtgcgggctggtgcgcctgatggaagccaacccgaacgccgggatcattcagtcgtcgccgaaagcgtccggtatggatacgctgtatgcgcgctgtcagcagttcgcgacccgcgtgtatgggccactgtttacagccggtttgcacttctggcaacttggcgagtcgcactactggggacataacgcgattatccgcgtgaaaccgtttatcgagcactgcgcactggctccgctgccgggcgaaggttcctttgccggttcaatcctgtcacatgacttcgtggaagcggcgttgatgcgccgtgcaggttggggggtctggattgcttacgatctcccgggttcttatgaagaattgccgcctaacttgcttgatgagctaaaacgtgaccgccgatggtgccacggtaacctgatgaacttccgtctgttcctggtgaagggtatgcacccggttcaccgtgcggtgttcctgacgggcgtgatgtcttatctctccgctccgctgtggtttatgttcctcgcgctctctactgcattgcaggtagtgcatgcgttgaccgaaccgcaatacttcctgcaaccacggcagttgttcccagtgtggccgcagtggcgtcctgagctggcgattgcactttttgcttcgaccatggtgctgttgttcctgccgaagttattgagcattttgcttatctggtgcaaaggaacgaaagaatacggcggcttctggcgcgttacattatcgttgctgctggaagtgcttttttccgtgctgctggctccggtacgcatgctgttccatacggtcttcgttgtcagcgcgttccttggctgggaagtggtgtggaattcaccgcagcgtgatgatgactccacttcctggggtgaagcgttcaaacgccacggctcacagctgctgttagggttagtgtgggctgttgggatggcgtggctggatctgcgtttcctgttctggctggcaccgattgtcttctcgttgatcctgtcaccgtttgtttcggtgatttccagccgtgccaccgttggtctgcgcaccaaacgctggaaactgttcctgatcccggaagagtattcgccgccgcaggtgctggttgataccgatcggttccttgagatgaatcgtcaacgctcccttgatgatggctttatgcacgcagtgtttaacccgtcatttaacgctctggcaaccgcaatggcgaccgcgcgtcaccgcgccagtaaggtgctggaaatcgcccgtgaccgccacgttgaacaggcgctgaacgagacgccagagaagctgaatcgcgatcgtcgcctggtgctgctaagcgatccggtgacgatggcccgtctgcatttccgtgtctggaattccccggagagatattcttcatgggtgagttattacgaagggataaagctcaatccactggcattgcgtaaaccggatgcggcttcgcaataaaaacgtagttgcctgatgcgctacgcttatcaggcctacatcgttcctgcaatttattgattttgcaagactttgtgggtcggataaggcgttcacgccgcatccggcaaaaacaacgagccaataaaaataccggcgttatgccggtatttttttacgaaagaggtatcaaatgcgtttaattgtggtgagcatcatggtgaccttgctgagtggctgtggcagcattattagtcgcactataccggggcaggggcatggcaaccaatattatcccggtgtgcaatgggatgtgcgtgactccgcctggcgttatgtcacgatccttgatctgccattctctctggtttttgatactttactgctgccgatcgacattcatcatggcccgtatgagtgattaacgttcatcccactcatcagctgctgcgcgtccttcctcggtatccagcggtggctcaagctgaaattccccctcgtcccattcatgtaatgtattctcttcctgccactcctggcgtatctctatctcatcatagtcgccatcaaaaacactttgcgcggcttcaccgctaagcataggtaaacattcaccttcttccccttcgtcggcaaaaaactcaacttgccacatgatgtcgccgtcctgcaaaacgtatttttgggcattgaactgttgcacattcgcatcttcggcgtcgatgccggggttgtctgcaagaaattcttcgcgtgcagcgtcaatggcttcttcaagcgttgcgtacatggtcatcacgattctccctttgagttgatgaggtttcagggaaaaggatagctgattctccgcttttgcaagtatgaaaggcgaaaaatcagttgcttacctggggtattcgacgacgacgtagactgttccaactatagactgcgttgaataacactacgccagcggtgacgagaaataccgctctgaaaccgtagttcgcactaatcgctgctcccatcaatggtccggtaacgttgccaatatcacgaaagctttggttatagctgaagatacgcccggcgatctggttgctgctgttgtaaaccaacagtgtctgtacggcggggagtagtgcaccatcggcggcaccgagcaaaaaacgtaaaatcccaagttgcaatggcgtctgaacgtaagacattgggatcaacagcagtacagaaaagatcagcgctgtaatcaggatcttttcgggtccgattcgatcgccaagtttgccgagtcgtggtgcacttagcagagccgccacgcctggcacgctggcgatcatgccactgataaaggcgacgttactgacgttacccgccagttcgcggacatacagcgtcagaatgggggcaatactgcccgtcgccacctggatgattaacgtagtgacaaacaggctgagtaccagtttcgggtttttaagacttgtcaccacttcccgcatgtgcagcatctcttttttgctgaccggctggaatttttctctgatgcaaaacagggtgacgaaaaagcagagtatgagcacactggcggtaataaagaataccggacgtaagccgtagctatcggcgagcaggccgccagccattgggccgagcaacgcaccactaacgccgcctgtggagagcgtacccagcgcccagccgcttttattacgcggtacttgtgtggcgataagagcattagcgttggggacaaatccgccaagtaacccaagaagcgcccgcaggatcaaaaactgccagatattttgtgccagccccatcaacaccatcacgatgcccatgccgagggcagagcgtaatagcatgagttttcggcctttacggtcggcgagtccaccccaaaacggactggcgatggcgctaaataaaaatgtaatgctgaagacaataccggaccacatattcagggcggagtgaccggtaacgccaagctgctcaacgtagaggggtaagaagggcattaccagactgaaggcggcaccggtaagaaaacagcctagccaggcgacgatcaggtttcgtttccagtttataggggtgtcattttcacagggactcatagcaatccgctgttggtgcgccaggcgcggtgaacataagaagaaaagataagcacactaattatgcgcccgacttccagggggcgcaatccagagagcttttatcgctaaatcagggggatttgctgtggtaatgccggatgccattctgaagcatccggcatgggagatttaatagcgactaggaacgccttccgggcgtgttttaaagcgacggtgtaaccacatatactgctctggtgccatcatgatgcatttttcgaccactttgttcatccacgcggcggtagtttcggcatcatccagtggcggagaacactctggcggcagcataatcaattgataccctttgccatctggcttacggcgtggaacgaagggcaccagacatgcgccggacatccgtgccagcatccaggttccggtcgtggtcgcagcctgctcaacggcaaacaacgggacgaaaacgctactgcgcgggccgtaatcatgatccggtgcgtaccagaccacttcgccttttttcagggctttaatcatgccttttaaatctttgcggtcgagcatgcttttattactgcgcaaacggccccaggtttgtagccagtcaatcagtggattatcgttcgggcgataaacgccaatacccggttcctgcataccaaactgccgcgcacccagctccagtgtcagaaaatggatgccaactaacaggatgccgcgtttttgcgcctgcacgtcacgaatgtgttccatgccgatcacttccgtccagcgggcgattcggcggtccggccagaaccacgccatgccggtttccatcaggcccatgccaacggattcgaaattcttcaccaccattttacggcgttcttgttcgctcatttccgggaagcacagttccaggttgcgatgcacaatttttgcgcgtcgtttcataaaacgtaacgccagttttcctaatccacaaccgaggcggtagataaccgggtagggcaattgcacgactaaccaaagtacgccaatacccaaccaggttaaccaataacgcggatgaagcagtgcggtggagaacttgggtagattcgtcatatcaatcctgtttttcaacctattcgggcaattgtatgtattgtcgcattttttcgcccgcaaccaaaatttgtggctgaagactgggcgaaattgccgcgcttgtaaataacaaataatttttaatgcgcaaatgtagcgtaaaatgtgtggatgttaattatcgataattgctatatcatgccgcggatttttactttcccatctcgcaggaaccgtacaccatgccagtgttacacaaccgcatttccaacgacgcgctaaaagccaaaatgttggctgagagcgaaccgcgaaccaccattagcttttacaagtatttccacatcgccgatcctaaggcgacccgtgacgctttatatcagctgtttaccgcgctgaatgtttttgggcgagtgtatctggcgcatgagggcattaacgcgcaaatcagcgtacctgcgagcaatgttgaaacatttcgcgcgcagctctatgccttcgacccggctttagagggtttacgcctgaatatcgcgttggatgatgacgggaaatccttctgggtactgcgcatgaaggtacgcgatcgcattgttgccgacggtattgacgatcctcactttgatgccagcaatgttggtgagtatctgcaagcggcggaagtgaacgccatgcttgacgatcccgatgcactatttatcgacatgcgtaaccactatgagtatgaagtggggcactttgaaaacgcgctcgaaattccggcagataccttccgtgagcagctgccaaaagcagtcgagatgatgcaggcacataaagataaaaaaatcgtcatgtactgcaccggcggcattcgttgtgaaaaggccagtgcctggatgaaacataacggattcaacaaagtctggcatatcgagggcggaattattgaatacgcccgtaaggcgcgcgagcagggcttgccggtgcgttttattggcaaaaattttgtttttgacgagcggatgggcgaacgtataagcgatgagattatcgcgcattgccaccagtgcggcgcgccgtgcgacagccataccaactgtaaaaatgatggctgccacctgctgtttattcagtgtccagtatgcgcggaaaaatacaaaggttgttgtagtgagatttgctgcgaagaaagcgcgttaccgccagaagaacagcgacgccgtcgggcaggacgtgaaaatggcaataagatctttaataagtctcgtggacgtctgaatacaacactgtgcattcctgatccaacagaataaatatcattgccggatgcgtgccatccggcaacatttcacgcttacttctgctgtacgccttccacactaataatcagatccacttcctgagaagctggacctaaatctgtcttgatattgaagtccttgagcttaattttgccttcggcctcgaagcctgcacgtttaccaccccatgggtcgtcgccctgaccaattaatttcgcttccagcgtgacgggtttggttacgccattcagcgtcagatcgccggtaatatccagttcgtcaccgtctttcttcacgctggtggaggtgaatgttgcctgtggatattttgcggtattgaggaaatctgcactgcgaagatgtttatcgcgttcggcgtgattagtatcgacgctggtggtgttaattgtcacattcactttatcggcagccggatttttttcgtcaaaggtaaaagtaccgtcgaaatctttaaaggtgccgtataaccagctatagccaaggtgctggatgcggaaattaacaaaggcgtgctgaccttctttgtcaattttgtaatcggcggcaaccgcactaccggcagagaacatcagggacgcgaaggttaaaccaagcaggctttttttcattttttatactccatagtcagaactgctctttcccagcatgcgcttcagagtgtcgtctttatcgatgaaatgatgcttcagggccataaatccgtgcataacggacagtactacgacgctccacgcgagccaaaaatgcagggcaccggcaaagtctgcctgtgcgccagcgtcggcaagggtcgcggggacgtcaaaccagccaaaaacgctgatcggtttaccatcggcagtactgatcagatagccgctgatgccgatggcgaaaagcaataggtacaatgcgagatgtccagctcttgcggcaagacgagtcatggggctataactcggcagcggacccggcggtggagatatgacacgccacagaacgcgaataaccagccccatcattaacaaaataccgatgcttttatgcagttcgggtgctttgtgataccagccatcgtaataactgagcgtgaccatccacagacctaaagcaaacatgccgtagacaataattgcgcttagccaatggaaggccgcagatataacaccatagcgttcaggggtatttgtgaaactcataagtgcatccaaaacgaatttgcgagagaaagaaaatggcgtgtcggagaatgaattgcaacacaaaaataacaaattgaatgatatttatttttatttcaataattttgaattaataatgaaagaatcttcataagtttagtgggttcagcatcagagatgtctggtgagtgctgtagaagcaggaataatctcattcaatttttcacgctaaatgaaagggagattaaatatttgtcagtttatgtcagtgcggaaaattaaaaataaaacacatagatcagatccataattgccaacaatccccagagaaaaagataaagcatcagatgctcgcgaatattattgatgagatagtgcaacagccgacgcattaaatactcctgtaaaaacggcctcattctggaggccgtaatgatgattattggaagcgggaaagcctgaatggcgtcaaatcaaaatcgctttttttgtcttgcgcaaaatcggcagctatttcccctaaaacactcgcaaatttaaaaccgtgcccactcaggccggtaatgagcagtgtattatcgtggccgggtagggtatcgataataaaatcttcgtcagggctattatcataggtgcaggcagcgccgtacaggcagcaaccgatacccggcaatacattgcgcaagaacgggaaggcttcactcccatcactggccacttccgcaaacggaacacgttcatccgcactatggataacctggcctccgttatgtttgccaatcttcaacgcgtcgttttctgccggaaaaccataatattgatcgccattgggcagttcaccggtaaacgccgggaatttattcttcacgctatagcggccatcggcctgataccaggcaaatactttgcgtacgggctggacaggcagctccgggagcaggtcttttacccatgttcccgcgcagacaatcgcttttttcgcctgatactcaccgtcagccgtttcaatagttacgccatcatcgtcatgacgaattgcggtgaccgggcagttgaacagttgcgcacagcccgcttccttcgccagttggatccaggttttaatcgccagttcgctgcgcaaaaaaccggaatcagtttcaaataagccgatgtagttgtccgggacgcgtatttccggccagcgggccataatcccttgcgcatcgagcttttcaacgttgagttgccattgttcggcgctgtgggcgacgttggcgagaaatgtggaatcagccgggccaaggttaatgacgccagagcgtacaaaaatgggatcttcttcgttgtggcgggagagttcatcccacagcgtttgcgcgcggaggaccagcgggacatacttttcgccttcaccataagcatggcgaattaatcgcgtatcgccgtggtggctgccgtgttgatgcggtggcatatgggcgtcggtcattagcacgtttaaaccggcgcgggttgcataatacccggcggcagcgcctacggaaccgctgccaataatgatgagatcgtatttcatttttttctctctgctctcatggtttaagcagagtaattaactgaatgcagatatacaacccagaaatggtaaaggcaccggtgaggtgccttttgggtggatggtcatgtcatgttaatgacgccgatactcgtttacctggaaatcaccggattcaattttggcgattcctgcttctaatatgctaataaattgtctggcaacatcagtggttaaccagagcgtctgaccaacttcagtcccttcctgctcggacttatttggggtctggtagtgcaaacgcaacatcagcgcatcatagctatcaacggtgctgatgtcccaccctacgagcggatgagtctgaatgacttcattatttttttccatcatggccccctaattcgtgttactagacaacgttattcgaggttcaatgcgtttttatctgaagcaacttcagtataccaataagtaagggtattcaccgaatttttaaagggggaaacagataaatttctgcttttaagatttatatgaacaataaaacagcatgtcattcatatttttttagcatattgtgcaattattttgaggaagtgtagaaattttgtactcaaaattcgtaagtaaaataaaaaagccggggcgacccggcaaaaaaaatcactgcatattattcgctgacaaaccagtcatcggcgctttcccacgtttcctggagaatttcactaatgcgctgtttatcttcttttgtcgcgccaataacgcttaaattattcgctgcggcataacgtacgcttacgtggccttcattatcaggaaacgcatactgaatacggcgggaaagttcgccagccagggcgtcaatagccccagctggcaatggagaagttttcgctatggtgacttcaattcgcataatagccccctgttgaatatactggttatttatacaggtaaaataacctaatgacaacaggaagctacgatttttattgtttaacggaccagcgtaccgtttccccggcgaggaatggcaccagcgtgtcatcagtcagtgcgatgctttcagcaacctgttgctcttcacgtaccagttcgatgaatgtgtcgttgaccggcaacccatagaactgcgggccgtttacagaacagaatgcttcaaagtgctgcaaagcattcatttcttcaaagacggtagcgtaactgcccagcgcggttggggcgttgaagcagcccgcgcagccgcaactgctctctttgcgatgacgtgcatgtggcgcagaatccgtaccgaggaatactcgattaaaaccgctggcgaccagttcacgcaatgcctgttggtgaatattacgtttgaggatgggtagacaatacaggtgcggacgcacgcctccaaccagcatatggttgcggttaaacatcagatgctgcggagtgatggtggcagccagccgttcatttccgtcacggacatagtcggcagcatctttggtggtgatgtgctcaaaaacgactttcagcgcagtcaggcgctggcgcagaggttccatcacgctttctataaagcgcgcttcacgatcaaaaatgtcgatatctgcatgtgtcacttcaccatgcaccagtagcggcataccgattttttccatgcgctcaagtaccggcatgattgcgtcaatactcgtcacgccgtggctggagttagtggttgcgtttgccgggtaaagttttgcagcggtgaacacgccttcgttaaatccgcgctccagctcattaggatccaggctatctgttaaataacaggtcatcaatggggtgaaatcgtgcccggcaggtacggcgtcaagaatacgctggcgatacgccacggcagcctcaacggtggtcacgggcggagccagattgggcattacgatagcccgtccataaatttcgctggtatatggcacgacagtttttaacatgtcgccatcgcggaggtgaaggtgccagtcgtctgggcggcggatctttaatacctgggatggtgcagtcattaatctctatgctccggctgaagggatgtttttgccggacacaaaggataagcggaaacgttttcctttgcacgaaaaataaagggcgcgaatgcgccctcgtgattaatcagtaaatggaatgacaatttcgcctggcttcacttcaatgcctttcgccagttttttcgccattgcttcgccctggctgccatcttcgcgcaggacgtaagcaggttgctggttaaagtaattgcgtaatgcctggttcaaatagggaagcaacgtttgcatcaccgtttgcattttttccggttgtaccgtcgcatcgaccacttccatctctttcaggaagatcgcacctttttctttatcaaacacgggcagcgctttcagcttcagtttcatggtcgctttctgactaccgaacagggagttcatgtccagattggcgtctccggttagggtaaccttattcggctcttcgcgaccaatttggctggtcaggtttgtcagaacaatatgggcgtcagccacgccgggtaaaccgatatctttactgaaattattatgtttcgcaaggctctggttaatttcttgttcggtgatggtgtattgggtgagttgattacagccaacgagcaggccactgacgatcaatgcagcggcaaataaaaacttgttcatggtagtcctcgacatgaaatctgcgtcaatatcctgacacaacgcagcatgtgtcaccagcgataaactcgccagcagaaaaaactgaaaacggcggcaacccgcgaatacaggctgccgcggcgggtcaggattaaatcgccatactacttaacaaattgatttgtgtctgtttcgccatattatcgcggtaatcagcaacgcggcttggccagttaattccggctaccagcgtcagattacgcagtagcgggaatagctgaatatcatcttcgctaagttcgccattcacggcgttcggtttgacgatcagtttgtccagcgcacgtaaatcatcgctgatattcttaatcagaccgtcagagtgggccagcaggtcggcaaaattacccgcgctggcctctttcttgtcgacgaaatatttgcgcgcggcgggagtagaaaactcatcaaatgcgcttttggcaaaacgcggcaacagcagtttgttggcgtagccattgaccttgcgcagccactcttcaatggcaggggaacgtttgccggtcagtaacggtttgccgtcgagtttatcgacatagtgaacgatgtccatgctttctggcatatagcggctgtcatctttttgcagaatgggaacctgtttttgaccgaccatccgggtgggtgtttctgcgtcgtcgttgagcagaacatgtaattcgacggggatatttttcaggccgaaaatcatgcgggctttgaggcagtaagggcagtgatcgtaaatgtatagcttcacgtgactcctccatttggctgtcagttcactttcagtatgaaggagtcaggggggagtatcaaatcaggcgtcgcgttcaagcaaacgacgcgcggcgcgtttctggctaaactgccaacccagcgcaaggaaagtgaagatgccaataatgcccagcatcatccacggaagctctggctggtgcgcgcttttgcccaggtcaaacagccagccgccaccgatataaccaatagcgccgccaatcgccagacccagacggctaaaccccatatagctgccgcgagctcttgcgtccgccaggctagcacttaaggtttcacgcgcaggctcggcaatgatgctcccgatataaaacagacaaatcagggtgaaaagttgttgcaggccgctgaccatgcccaccggcatcatgcttaaactcattatcaacagcccagccatcaaccggtgttccagacgaaaatgcttttcactccagcgggcgatagggtagagcaacgttaagctcagacacgcttcaatggcatacatccatttaacggcagagggcgcgcagccacgtcgttgaccataattggcagcatcagcatcacttgtacagccagcatgtagtaacccgccagcgtcagaacataggtgacaaaacgcttgtcacgcatcacgcgggtcatgccttcgcgaacgggcgtgcgtacggtggagagtttccatgctggtaacaaccacgcattgaacgccgcacatagcacaaatagaactgcccctgtggcgcagaccaggcgaaagtcgtattgcaacagccagctccccaacaatgcgccaatgaccgcaccggcactgtcctgcatcatcaacaggctgaaaaaacgaccacgctgctgtggacggattaatttcaccaccagcgcgctacgcggcggatcaaacaacgtgccaccgagtccgctgagcaggcaactaaaccacaatagccacggttcgtgggcgatacccattgtggcgaatccggcggcgcgcatcagcataccggtaacaatcatcggtttggcaccaaagcggtcggcaattgcaccgccgaaaatacccagaccttgctgaataaattggcgtagaccgagagcaataccgaccatgacggcggcccagcccatttgatcaacgaagcggatagagatcagcgggaagacaacaaagaaccccagcacgaccagcatattatcgatgagcaggaaatatttacccaggttcctcgcctggctcacgcgggacatttcccctcccgggaaataaaagatgagcactttctattctgcattgccgctaagacttttcccatcacttcggggacaatatttttttatcaaaacgtcgctttgatagagagtttttatcaaatatgtgaataatgcagaaaatggcattttggacttttcacagggtctggttgcgcaggtatagtaatacttacagcgtattaaagacgttacgggaaggagtaggtatagaatgtttggctatcgcagtaacgtgccaaaagtgcgcttaaccacagaccgactggtcgtgcgtctggtgcatgatcgtgatgcctggcgtcttgcggattattacgcagagaatcgccatttcctcaagccctgggagccagtgcgcgacgaaagccactgttatccaagtggctggcaggccaggctggggatgattaacgaatttcataaacaaggtagtgctttctactttggcttattcgacccggacgaaaaagagattattggcgttgccaatttttccaatgttgttcgtggctcttttcatgcctgctatctcggttatagcattgggcaaaaatggcagggcaaaggactcatgtttgaagccctgaccgcagccattcgttatatgcagcgcacccaacatattcatcgcattatggctaattatatgccgcacaataaacgcagcggtgatttactggcgcgactgggttttgaaaaagaaggctatgcgaaagactatctgttgattgatggacaatggcgcgatcacgtactgacggcattaactaccccagactggacgcccggccgctaaggagaatctcatgaaatatcaacttactgcccttgaagctcgcgtgattggttgcttgctggaaaagcaggtgaccacgccggagcaatacccgctcagtgtcaatggtgtagtcacggcctgtaatcagaaaacgaaccgtgaaccggtcatgaatctgagtgaatccgaagtgcaggaacagctggataatctggtcaaacgtcattatctacgcacagtgagcggttttggtaatcgggtcaccaaatatgagcaacgtttttgtaatagtgaatttggcgatctgaaactgagcgcagcggaagtggcgttaatcaccacgttgttattgcgtggtgcccagacgccaggtgaactgcgcagccgcgccgcgcgaatgtatgaattcagcgatatggcggaagtggagagcacgctggaacaactggcaaatcgcgaagatggtccttttgtggtgcgtctggcccgcgaaccgggtaaacgcgaaaaccgctacatgcatcttttcagtggtgaggttgaagatcagccggcggtgacggatatgagcaacgcggttgacggtgatttacaggcccgcgtcgaagccctggaaatcgaagtggcagaactgaaacagcgtcttgatagcttgctggcccatctgggagattaaagtgaaaaaattacgtatcggcgtagtgggattaggtggcattgcgcaaaaagcgtggttaccggtgctggcggcagcgtctgactggacgttacaaggagcctggagccctacgcgcgcgaaagccctgccaatttgtgaaagctggcgcattccttatgccgatagcttatccagccttgccgccagttgcgatgcggtttttgtgcattccagcaccgccagccactttgacgtggtcagtacgttactcaatgcgggggtacatgtctgtgtcgataaaccgctggcagaaaatctgcgcgatgctgaacggctggtggaactggcggcgcggaaaaaactgacgttgatggtcggttttaaccgtcgtttcgcaccactctacggtgagttaaaaacgcaactcgccaccgcagccagcctaagaatggataaacatcgtagcaatagcgtcgggccacacgatctttatttcacgttgctggatgattatctgcatgtggtggataccgcgctgtggttgagcggcggcaaagcctctctggatggcggtacgctactgactaacgacgctggcgaaatgctgtttgccgagcaccattttagcgctggtcctttgcagatcaccacctgtatgcatcgccgtgccggaagtcagcgtgaaaccgtgcaggccgtgactgacggtgcgctcatcgacattacggatatgcgcgaatggcgtgaggagcgcgggcagggcgtagtgcataaaccgattcctggttggcagagtacgcttgagcaacgtgggtttgtcggctgtgcgcggcacttcattgaatgtgtgcaaaaccagacagttccgcaaaccgccggcgaacaggccgtgctggcgcaacgtatcgttgacaagatctggcgcgatgcgatgagtgaataaaccctgtaacatctggcggtagcaattcaccataatccaggtagactattcgcctctttcagcgcctgccttgcaggcgttttgcccgtgggtctggattagaacaccgatgaatttattaaaaagcctggccgccgtcagcagcatgaccatgtttagccgtgtgcttggcttcgcacgagacgcaattgtcgccagaatctttggcgcagggatggcaaccgacgcctttttcgtcgcttttaaacttcctaacttgttacgccgtatctttgccgaaggggcattttcccaggcatttgtaccgattctggcggaatataaaagtaagcagggtgaagacgccacgcgggtctttgtctcttatgtttctggcctgctgacacttgcgctggcggttgtgacggtcgctggcatgctcgccgcaccgtgggtgatcatggtgaccgcgccaggcttcgctgacacagctgacaaatttgccctgaccagccagctactaaagattacctttccctatatcttgctgatctccctggcgagcctggtgggagcgattctgaatacgtggaaccgcttcagcattccggcgtttgctccaacactgcttaacatcagcatgattggtttcgcgctgtttgccgcaccgtactttaacccaccggtgctggcgctggcgtgggctgttacggtcggcggcgtcctgcagctggtgtatcagctaccgcacctgaagaagatcggcatgctggtcctgccgcgcattaacttccacgatgccggagcaatgcgcgtggtgaaacagatgggaccggcgatccttggcgtctctgtgagccagatctccttaatcatcaacaccatttttgccagctttcttgcttccggtagcgtgtcttggatgtattacgccgaccgcttaatggagtttccgtccggtgtgctgggcgtggcgcttggcaccattttgctgccgagcctgagcaaaagttttgccagtggcaatcatgatgaatacaaccgtttgatggactgggggttgcgtctttgtttcctgttggcgctgccgagtgcggttgcgttgggcattctttccggtccgttgaccgttagcctgttccagtacggtaaatttaccgcgtttgatgcgctgatgacccagcgggcgttaattgcctacagcgtgggtttgattggcctgattgtagtgaaagtgttggctcctggcttttattcccgccaggacattaaaacgccagtgaaaattgccatcgttacgctgattttaacgcaattgatgaacctggcgtttattggtccgttgaaacatgccgggctgagtctttctattggtctggcggcgtgtctgaatgctagcctgctttactggcagttgcgtaagcagaaaatctttaccccgcaacccggctggatggcgtttctgttgcgtctggtggtggcggtactggtgatgtctggcgtgcttttaggtatgttacatatcatgccggagtggagtttgggtaccatgccctggcgtttactgcgtttaatggcggtcgtgctggcggggattgccgcgtacttcgctgcactggcggtactgggcttcaaagttaaagaatttgcccgccggacggtgtaacaatgcattccggcctgcagtgttcgctttaaaacatatcatgaaactgggtatgttttgtctgcctgctctgggatcgctggggcgggcatttttttgcctattttgcattgttggttagcaaggatgccattcgatgaattttaatatgttgattcaaagatgaaataaaaaagccctgcagttaccagggcttgattactttgagctaattattactcaacaggttgcggacgcgcaggagcggcagaggcatgatgtgttgccgtatgaccacctgcggcacctttaccttcgaaggcaaaagtagggcgctgccagtcactgtgacgcggtgcctccggaacatattccggtgctggagcgcgcgtcattggcgcggtagcgtggttatgctcaacggtgacctcaggttcgaccgcagctaccgtttcaacttctgctgcgacttcagcgactactggcgcggcaggttgagcaacaacttcaggttcagcaactacaacctcagcagtttcgacaacttcttcaatatctgccgtctcttcctgcggttcaaccaccggttctgcttgttctgcaacttcctgggctacggcaacatcagactcggtaatcacctgcggctgttcagttaccgcggcagcgatcacttcaggatgcgtcgtttcaaccacttccggttgcggttcggcaacctgaacgggggcttctacgacaccggccacttcttcaacaactggcgcgctaacaaccggttcgatagcggcggcgacagggacctcagtcaccatcggctgcacatgtacttcttcctgttcgcgctgctcttcaacctgtacatcttgcggacgtacaattggatagcggatccagactttgccagaggccagttccggagacgcgcacgctacggtcaacggcattgggctctgggttggataacgctcgtcacgatagcgacgacgacgctgaccacttacgcgcaggtgacgagggctgcggcgagaacgacgcggcatgccaccgttgtcacggttatcagcattgttctcttcttgctgttctggtgcagtttgcgctacgactggcagcgggactttcaccagttctgtgcgtggagctggcgcttcctgaacaattggttcggcagcgacagtttcttcaaccaccggtgcgactaccgcttcttcggctacgctttgctcgtaacgcactttctgattgagctgacgctgtttacgacgcggctgaaccggacgtacacgttcttcctgttcggtttcctgaacagattgctcttcaacattcagcgccttcgcttcttgttgcgcctgacgtttatcatcattacggcggcggctacgttcacgacgcggcgcttgctgctcgtcggcggtacgcgctttttccgttacctcagcctgctgacggctctcacgcgtctcggcagtctgctgctgtgcctggcgacgattacgacggttttcttcgcgattatcgctgccttcagtacgttcactacgggtgtcgcggcgctcattacggtcacggcggttgttctgacgaggcttgcgacgatcctgttgacgttccggtttcgcttctgctttcggtgctggttgctcggtcggtttggtttcttcaccaccgctgaacagcgctttcagtgcgccgaagaagcggctcaacagcccaggttgtgcaggagctgctggtgttgccggtgcagctttcggtgctggagctacaacaggcgcggcaggttcagctggcgttggcgcaggcggcacatccggcatggcaaaggttgccagcgcaggttgttccggacgcttacgttcagcgaactcttcttcagacggcagcgccatcgcttcttcatgcagcttcggcagcatgtagcttaaggttggggtttcttcccctttacgcacgcgcagcacgtggtagtgcggggtttccatctgatcgtttggcacaattacacagcgcacaccgtcctgacgagtttcaatggcatttaccgcagaacgtttttcattcagcaggtaagaagcgattggcacaggaacaatggcgtgaacttcctgggtgttctctttcagcgcttcttcttcgatcagacgcagaatagagaggctcaggctttcgttgtcacgcacggtgccagtaccagaacaacgcggacaaacgtgatgactggattcacccagacttgggctcaggcgctgacgggacatttccagcaggccaaagcgagaaatatggctgatttgaatacgcgcacggtcctgacgcaccgcttcacgcagacggttttctaccgcacgctggtggcgtactggcgtcatgtcgatgaagtcgataacaatcaggccgccgaggtcacgcaggcgcagctgacgagcaatctcatcggcagcttcgaggttagtgttaaacgcggtttcttcgatatcgccgccgcgggtcgcgcgtgcggagttgatgtcgatggccgttaacgcttcggtgctgtcgataacaatggaaccaccagacggcagacgaacttcacgctggaaggcggactcgatctgactctcgatctggtagtggctgaacagcgggatctcgccggtgtacagtttgattttgctgctgaaatccgggcgacctaatgcagcgatatgctgacgtgccagttcgagcactttcgggttatcgataaggatttcgccgatgtcctgacgtaagtaatcgcggaatgcgcgaacgattacgttgctctcctgatgaatcaggaacggggccgggcggctttcagcggcttttttgatggcttcccagtgtttcagacggaagcttaaatcccattgcagcgcctcagcagatttgccgacgccagcggtgcgcacgataagccccatgccttccggcagttcaaggcttgccagtgcttcttttaattcggtacggtcgtcgccttcgatacggcgagaaatgccacccgcgcgcgggttgttcggcatcagaaccagatagctacccgccagactgataaaggtggttaatgccgcgcctttgttgccgcgctcttctttatcgatctgaacaatgacttcctgaccttcacgcaacacatctttaatgttgggacgaccatgagcactgtagttagcagggaaatattcgcgggcaatttcttttagtgggaggaaaccgtgacgttcagcgccgtaatcaacaaaagcagcttccagactcggttcaatgcgggtgattttacctttgtagatgtttgcctttttctgctcgtgccctggactttcgatatccaggtcatacagacgctgcccatctacaagggcaacgcgcaactcttcctgctgagttgcgttgattaacattcttttcatcgtaacttactcattattcttacattgacgactaagctgcgggcaaagtaacgcctttccgggtgtgaaccgatggcctcgtgtctagtcgcgtcgccaacctcacggttatcgtcagctcaaagaggcgcagagtgtgagttgcccgtttttcatgcggaaaaacagcgcaattatcaaagaaacagactgggtattactctccagaaatatttccatctaccggtaaggactgcaacccgcagcccgctaactgcctgaaagatcaatacgtcttacgccattgctgcgtggatgatcggtcgggcaaaatgggttattccgtaaaatttcttgttttaacaaggatggacacggaaacggcctcattattccactgcaagccttgttatagcaagatgacttttaccatttatcacccgcttactcacagttttttcacttcttgctggtgattggtttaataaccatcaataaagtgatcacgcagtgaagtaataaggtgcaaaagtaaatataagcatagaaaaatgagtggcgcgaatcctgttggctaattagaatcgccaaccatgaaaacagagactccatccgtaaaaattgttgctatcaccgctgacgaagcggggcaacgtatcgataactttttgcgtacccaattgaaaggcgtaccaaaaagtatgatttaccgtattttgcgtaaaggcgaagtgcgggtgaacaaaaaacgtattaagcctgaatataaactcgaagcgggtgatgaggtgcgtattccaccggttcgcgttgctgagcgggaagaagaggcggttagcccacatctgcaaaaggtggcggcgctggcggacgtcatcttatatgaagatgatcacatcctggtgctgaataaaccttccggtacggcggtacatggcggcagtggtttaagcttcggcgttattgaaggtttgcgggcgttgcgcccggaagcgcggttccttgaactggttcatcgtcttgaccgggacaccagtggtgttttgctggtagcgaaaaaacgcagcgcgttgcgttctctgcatgagcaattacgtgaaaaagggatgcaaaaagattacctggcgctggtgcgcggtcagtggcagagccatgtgaagagcgttcaagcaccgttactgaaaaatattctgcaaagcggcgaacgtatcgtgcgtgtgagtcaggaaggcaaaccgagcgaaacacgctttaaagtggaagaacgctatgcatttgccaccctggtgcgttgtagcccggtaacagggcgtactcaccagatccgtgtgcatacacaatatgcgggtcatccgattgcctttgacgatcgctacggtgaccgtgaatttgacaggcagctcactgaagcaggcacgggattaaatcgcctgttcctgcacgctgcagcgttgaagtttactcatccggggaccggtgaggtgatgcgtatcgaagctccgatggatgaaggtttgaagcgttgtttgcaaaagctgcgtaacgcgcgctaatacaagcatataaacctgataatgggcggttggcctgataaggcgtttacgccgcatcaggccgccagcaccgattgccggatgcgacgtaaccacatccggcgcaaaaaattatcccatcagcgggtttttcccttcccgacgtaacatctgacacagcgcgattagcggtaaaccaaccagcgtgttaggatcacgcccctctaaacgctcaaacagcgtaatgccaaatccttcactcttaaagctacccgcgcagtgcaggggatgctctttacgcacgtaattatcaatctccgcctcgctcaggtgacggaaatggacgtcaaaaggctccacttctgtttgcagatgcccattcgcgctattaaacaacgccagtccagtatagaaggtgacgatattgccgctggctttgcgtaattgcagacgggcattttcttccgttaacggtttaccggtgatttcgccatcaagaacacatacctggtcactaccaataattaaatgatccggataacgactcgccagagattgcgctttttcttgtgccagtcgaagcaccaactgtcgcggactttcgtcgctgcgtggggtttcgtcgacctctggtgctgcacattcaaaagagatttgcagtttttccagaagagcgcgacgccatgggctggtggaggctaaaataagtttaggcatatttttttccatcagatatagcgtattgatgatagccattttaaactatgcgcttcgttttgcaggttgatgtttgttatcagcactgaacgaaaataaagcagtaacccgcaatgtgtgcgaattattggcaaaaggcaaccacaggctgcctttttctttgactctatgacgttacaaagttaatatgcgcgccctatgcaaaaggtaaaattacccctgactctcgatccggttcgtacggctcaaaaacgccttgattaccagggtatctatacccctgatcaggttgagcgcgtcgccgaatccgtagtcagtgtggacagtgatgtggaatgctccatgagcttcgctatcgataaccaacgtctcgcagtgttaaacggcgatgcgaaggtgacggtaacgctcgagtgtcagcgttgcgggaagccgtttactcatcaggtctacacaacgtattgttttagtcctgtgcgtagtgacgaacaggctgaagcactgccggaagcgtatgaaccgattgaggttaacgaattcggtgaaatcgatctgcttgcaatggttgaagatgaaatcatcctcgccttgccggtagttccggtgcatgattctgaacactgtgaagtgtccgaagcggacatggtctttggtgaactgcctgaagaagcgcaaaagccaaacccatttgccgtattagccagcttaaagcgtaagtaattggtgctccccgttggatcggggataaaccgtaattgaggagtaaggtccatggccgtacaacagaataaaccaacccgttccaaacgtggcatgcgtcgttcccatgacgcgctgaccgcagtcaccagcctgtctgtagacaaaacttctggtgaaaaacacctgcgtcaccacatcactgccgacggttactaccgcggccgcaaggtcatcgctaagtaatcacgcatctgcgtgatgaagcttagtgaggattttccccaggcaactggggaaagaccaaaccgggcggcgacgataccttgacacgtctaaccctggcgttagatgtcatgggaggggattttggcccttccgtgacagtgcctgcagcattgcaggcactgaattctaatagccaactcactcttcttttagtcggcaattccgacgccatcacgccattacttgctaaagctgactttgaacaacgtagccgtctgcagattattcctgcgcagagtgttatcgccagtgatgcccggcctagccaagctatccgcgccagtcgtgggagtagtatgcgcgtggccctggagctggtgaaagaaggtcgagcgcaagcctgtgtcagtgccggtaataccggggcgctgatggggctggcaaaattattactcaagcccctggaggggattgagcgtccggcgctggtgacggtattaccacatcagcaaaagggcaaaacggtggtccttgacttaggggccaacgtcgattgtgacagcacaatgctggtgcaatttgccattatgggcagtgttctggctgaagaggtggtggaaattcccaatcctcgcgtggcgttgctcaatattggtgaagaagaagtaaagggtctcgacagtattcgggatgccagtgcggtgcttaaaacaatcccttctatcaattatatcggctatcttgaagccaatgagttgttaactggcaagacagatgtgctggtttgtgacggctttacaggaaatgtcacattaaagacgatggaaggtgttgtcaggatgttcctttctctgctgaaatctcagggtgaagggaaaaaacggagctggtggctactgttattaaagcgttggctacaaaagagcctgacgaggcgattcagtcacctcaaccccgaccagtataacggcgcctgtctgttaggattgcgcggcacggtgataaaaagtcatggtgcagccaatcagcgagcttttgcggtcgcgattgaacaggcagtgcaggcggtgcagcgacaagttcctcagcgaattgccgctcgcctggaatctgtatacccagctggttttgagctgctggacggtggcaaaagcggaactctgcggtaacaggacgctgccagcgaactcgcagtttgcaagtgacggtatataaccgaaaagtgactgagcgtacatgtatacgaagattattggtactggcagctatctgcccgaacaagtgcggacaaacgccgatttggaaaaaatggtggacacctctgacgagtggattgtcactcgtaccggtatccgcgaacgccacattgccgcgccaaacgaaaccgttagtaccatgggctttgaagcggcgacacgcgcaattgagatggcgggcattgagaaagaccagattggcctgatcgttgtggcaacgacttctgctacgcacgctttcccgagcgcagcttgtcagattcaaagcatgttgggcattaaaggttgcccggcatttgacgttgcagcagcctgcgcaggtttcacctatgcattaagcgtagccgatcaatacgtgaaatctggggcggtgaagtatgctctggtcgtcggttccgatgtactggcgcgcacctgcgatccaaccgatcgtgggactattattatttttggcgatggcgcgggcgctgcggtgctggctgcctctgaagagccgggaatcatttccacccatctgcatgccgacggtagttatggtgaattgctgacgctgccaaacgccgaccgcgtgaatccagagaatagtattcatctgacgatggcgggcaacgaagtcttcaaggttgcggtaacggaactggcgcacatcgttgatgagacgctggcggcgaataatcttgaccgttctcaactggactggctggttccgcatcaggctaacctgcgtattatcagtgcaacggcgaaaaaactcggtatgtctatggataatgtcgtggtgacgctggatcgccacggtaatacctctgcggcctctgtcccgtgcgcgctggatgaagctgtacgcgacgggcgcattaagccggggcagttggttctgcttgaagcctttggcggtggattcacctggggctccgcgctggttcgtttctaagataaggattaaaacatgacgcaatttgcatttgtgttccctggacagggttctcaaaccgttggaatgctggctgatatggcggcgagctatccaattgtcgaagaaacgtttgctgaagcttctgcggcgctgggctacgacctgtgggcgctgacccagcaggggccagctgaagaactgaataaaacctggcaaactcagcctgcgctgttgactgcatctgttgcgctgtatcgcgtatggcagcagcagggcggtaaagcaccggcaatgatggccggtcacagcctgggggaatactccgcgctggtttgcgctggtgtgattgatttcgctgatgcggtgcgtctggttgagatgcgcggcaagttcatgcaagaagccgtaccggaaggcacgggcgctatggcggcaatcatcggtctggatgatgcgtctattgcgaaagcgtgtgaagaagctgcagaaggtcaggtcgtttctccggtaaactttaactctccgggacaggtggttattgccggtcataaagaagcggttgagcgtgctggcgctgcctgtaaagcggcgggcgcaaaacgcgcgctgccgttaccagtgagcgtaccgtctcactgtgcgctgatgaaaccagcagccgacaaactggcagtagaattagcgaaaatcacctttaacgcaccaacagttcctgttgtgaataacgttgatgtgaaatgcgaaaccaatggtgatgccatccgtgacgcactggtacgtcagttgtataacccggttcagtggacgaagtctgttgagtacatggcagcgcaaggcgtagaacatctctatgaagtcggcccgggcaaagtgcttactggcctgacgaaacgcattgtcgacaccctgaccgccagcgcgctgaacgaacctagtgcgatggcagcggcgctcgagctttaaaagaggaaaatcatgaattttgaaggaaaaatcgcactggtaaccggtgcaagccgcggaattggccgcgcaattgctgaaacgctcgcagcccgtggcgcgaaagttattggcactgcgaccagtgaaaatggcgctcaggcgatcagtgattatttaggtgccaacggcaaaggtctgatgttgaatgtgaccgacccggcatctatcgaatctgttctggaaaaaattcgcgcagaatttggtgaagtggatatcctggtcaataatgccggtatcactcgtgataacctgttaatgcgaatgaaagatgaagagtggaacgatattatcgaaaccaaccttagttctgttttccgtctgagtaaagcggtaatgcgcgctatgatgaaaaagcgtcatggtcgtattatcactatcggttctgtggttggtaccatgggaaatggcggtcaggccaactacgctgcggcgaaagcgggcttgatcggcttcagtaaaagtctggcgcgcgaagttgcgagtcgcggtattactgtaaacgttgttgctccgggctttattgaaacggacatgacacgtgcgctgagcgatgaccagcgtgcgggtatcctggcgcaggttcctgcgggtcgcctcggcggcgcacaggaaatcgccaacgcggttgcattcctggcatccgacgaagcagcttacatcacgggtgaaactttgcatgtgaacggcgggatgtacatggtctgaccgcgatttgcacaaaatgctcatgttgcgcgcagtctgcgtggttatgagtaataattagtgcaaaatgatttgcgttattggggggtaaggcctcaaaataacgtaaaatcgtggtaagacctgccgggatttagttgcaaatttttcaacattttatacactacgaaaaccatcgcgaaagcgagttttgataggaaatttaagagtatgagcactatcgaagaacgcgttaagaaaattatcggcgaacagctgggcgttaagcaggaagaagttaccaacaatgcttctttcgttgaagacctgggcgcggattctcttgacaccgttgagctggtaatggctctggaagaagagtttgatactgagattccggacgaagaagctgagaaaatcaccaccgttcaggctgccattgattacatcaacggccaccaggcgtaagtgaacatctccaggcggtcgttcgaccgcctgagttttatctttttgtcccactagaatcattttttccctccctggaggacaaacgtgtctaagcgtcgtgtagttgtgaccggactgggcatgttgtctcctgtcggcaataccgtagagtctacctggaaagctctgcttgccggtcagagtggcatcagcctaatcgaccatttcgatactagcgcctatgcaacgaaatttgctggcttagtaaaggattttaactgtgaggacattatcagccgcaaagaacagcgcaagatggatgccttcattcaatatggaattgtcgctggcgttcaggccatgcaggattctggccttgaaataacggaagagaacgcaacccgcattggtgccgcaattggctccgggattggcggcctcggactgatcgaagaaaaccacacatctctgatgaacggtggtccacgtaagatcagtccattcttcgttccgagtacgattgtgaacatggtggcaggtcatctgactatcatgtatggcctgcgtggcccgagcatctctatcgcgactgcctgtacttccggcgtgcacaacattggccatgctgcgcgtattatcgcgtatggcgatgctgacgtgatggttgcaggtggcgcagagaaagccagtacgccgctgggcgttggtggttttggcgcggcacgtgcattatctacccgcaatgataacccgcaagcggcgagccgcccgtgggataaagagcgtgatggtttcgtactgggcgatggtgccggtatgctggtacttgaagagtacgaacacgcgaaaaaacgcggtgcgaaaatttacgctgaactcgtcggctttggtatgagcagcgatgcttatcatatgacgagtccgccagaaaatggcgcaggcgcagctctggcgatggcaaatgctctgcgtgatgcaggcattgaagcgagtcagattggctacgttaacgcgcacggtacttctacgccggctggcgataaagctgaagcgcaggcggtgaaaaccatcttcggtgaagctgcaagccgtgtgttggtaagctccacgaaatctatgaccggtcacctgttaggtgcggcgggtgcagtagaatctatctactccatcctggcgctgcgcgatcaggctgttccgccaaccatcaacctggataacccggatgaaggttgcgatctggatttcgtaccgcacgaagcgcgtcaggttagcggaatggaatacactctgtgtaactccttcggcttcggtggcactaatggttctttgatctttaaaaagatctaagttgtcattttccacccttataaaaggtccgcttgcgggccttttttcttagcttttattccgacttgttccgtagtgaacatgctgccacactaacaattctctgataaggagccggtatgttcttaattaacggtcataagcaggaaagcctggcagtaagcgatcgggcaacgcagtttggtgatggttgttttaccaccgccagagttatcgacggtaaagtcagtttgttaagcgcgcatatccagcgactacaggatgcttgtcagcggttgatgatttcctgtgacttctggcctcagcttgaacaagagatgaaaacgctggcagcagaacagcaaaatggtgtgctgaaagtcgtgatcagtcgcggtagtggcgggcgagggtacagcacattgaacagcggaccggcaacgcggattctctccgttacggcttatcctgcacattacgaccgtttgcgtaacgaggggattacgttggcgctaagcccggtgcggctggggcgcaatcctcatcttgcaggtattaaacatctcaatcgtcttgagcaagtattgattcgctctcatcttgagcagacaaacgctgatgaggcgctggtccttgacagcgaagggtgggttacggaatgctgtgcggctaatttgttctggcggaagggcaacgtagtttatacgccgcgactggatcaggcaggtgttaacggcattatgcgacaattctgtatccgtttgctggcacaatcctcttatcagcttgtcgaagtgcaagcctctctggaagagagcttgcaggcagatgagatggttatttgtaatgcgttaatgccagtgatgcccgtatgtgcctgtggcgatgtctcctttagcagtgcaacgttatatgaatatttagccccactttgtgagcgcccgaattaatcatgaaaaaagtgttattgataatcttgttattgctggtggtactgggtatcgccgctggtgtgggcgtctggaaggttcgccatcttgccgacagcaaattgcttatcaaagaagagacgatatttaccctgaagccagggaccggacgtctggcgctcggtgaacagctttatgccgataagatcatcaatcgtccacgggtttttcaatggctgctgcgtatcgaaccggatctttctcactttaaagccgggacttaccgctttacaccgcagatgaccgtgcgcgagatgctgaaattgctggaaagcggtaaagaagcacagttccctctgcgactggtagaagggatgcgtctgagcgattacctcaagcaattgcgtgaggccccgtatatcaagcatacgctgagcgatgataagtacgccaccgtagcgcaggcacttgaactggaaaacccggagtggattgaaggttggttctggccagacacctggatgtataccgccaataccaccgatgtcgcgttactcaagcgagcgcacaagaaaatggtgaaagcggtcgatagcgcctgggaagggcgtgcggacggtctgccttataaagataaaaaccagttggtgacgatggcaagtattatcgaaaaagaaaccgccgttgccagtgaacgcgataaggttgccagtgtatttatcaaccgtttacgcattggtatgcgcctgcagaccgacccgaccgtgatttacgggatgggagagcgttataatggcaaactttctcgtgcagacctggaaacgccgacagcgtataacacctataccattaccggtctgccgccaggtgcgatagcgacgccgggggcggatagcctgaaggctgctgcgcatccggcaaaaacgccgtatctctattttgtggccgatggtaaaggtggtcacacgtttaataccaatcttgccagtcataacaagtctgtgcaggattatctgaaagtgcttaaggaaaaaaatgcgcagtaagtatatcgtcattgaggggctggaaggcgcaggcaaaactaccgcgcgtaatgtggtggttgagacgctcgagcaactgggtatccgcgacatggttttcactcgggaacctggcggtacgcaacttgccgaaaagttaagaagcctggtgctggatatcaaaagcgtaggcgatgaagtcattaccgataaagccgaagttctgatgttttatgccgcgcgcgttcaactggtagaaacggtcatcaaaccagctctggctaacggcacctgggtgattggcgatcgccacgatctctccactcaggcgtatcagggcggcggacgtggtattgaccaacatatgctggcaacactgcgtgatgctgttctcggggattttcgccccgacttaacgctctatctcgatgttaccccggaagttggcttaaaacgcgcgcgtgcgcgcggcgagctggatcgtattgagcaagaatctttcgatttctttaatcgcacccgcgcccgctatctggaactggcagcacaagataaaagcattcataccattgatgccacccagccgctggaggccgtgatggatgcaatccgcactaccgtgacccactgggtgaaggagttggacgcatgagatggtatccatggttacgacctgatttcgaaaaactggtagccagctatcaggccggaagaggtcaccatgcgctactcattcaggcgttaccgggcatgggcgatgatgctttaatctacgccctgagccgttatttactctgccaacaaccgcagggccacaaaagttgcggtcactgtcgtggatgtcagttgatgcaggctggcacgcatcccgattactacaccctggctcccgaaaaaggaaaaaatacgctgggcgttgatgcggtacgtgaggtcaccgaaaagctgaatgagcacgcacgcttaggtggtgcgaaagtcgtttgggtaaccgatgctgccttactaaccgacgccgcggctaacgcattgctgaaaacgcttgaagagccaccagcagaaacttggtttttcctggctacccgcgagcctgaacgtttactggcaacattacgtagtcgttgtcggttacattaccttgcgccgccgccggaacagtacgccgtgacctggcttagtcgcgaagtgacaatgagtcaggatgcattacttgccgcattgcgcttaagcgccggtagccctggcgcggcactggcgttgtttcagggagataactggcaggctcgtgaaacattgtgtcaggcgttggcatatagcgtgccaagcggcgactggtatagcctgctagcggcccttaatcatgaacaagctccggcgcgtttacactggctggcaacgttgctgatggatgcgctaaaacgccatcatggtgctgcgcaggtgaccaatgttgatgtgccgggcctggtcgccgaactggcaaaccatctttctcccagccgcctgcaggctatactgggggatgtttgccacattcgtgaacagttaatgtctgttacaggcatcaaccgcgagcttctcatcaccgatcttttactgcgtattgagcattacctgcaaccgggcgttgtgctaccggttcctcatctttaagagagacatcatgtttttagtcgacagtcactgccatctcgatggtctggattatgaatctttgcataaggacgtggatgacgttctggcgaaagccgccgcacgcgatgtgaaattttgtctggcagtcgccacaacattaccgggttatttacatatgcgggatctggtaggcgaacgtgacaacgtcgtattttcttgtggcgtgcatccactcaaccagaatgatccctacgatgtagaagatttacgccgtctggcggcagaagagggtgttgtagcgctgggtgaaaccgggctggattattattacacgccggaaactaaagtacgtcagcaagagtccttcatccatcatatccagattggtcgtgaactgaacaagccggttatcgtccatacccgtgacgcccgtgccgatacgctggcaattctgcgcgaagaaaaagtgacggattgcggtggcgtactacactgttttacagaggacagagaaacggcgggtaaattactggatctcggattttacatctccttttccggcattgtgaccttccgtaatgcggagcaactgcgcgatgctgcgcgttatgtccccctggatcggttactggtggaaactgacagtccttaccttgcgccggtaccgcatcgaggaaaagagaatcaacctgcgatggttcgtgacgttgcagaatacatggctgtgttgaaaggtgttgccgttgaagaactggcgcaggtaaccaccgataacttcgcccgtctgtttcacatcgacgcttcccgccttcaatccatccgttgaatgagtttttttaaagctcgtaattaatggctaaaacgagtaaagttcaccgccgaaaattgggcggtgaataaccacgtttgaaatattgtgacatatgttttgtcaaaatgtgcaacttctccaatgatctgaagttgaaacgtgatagccgtcaaacaaattggcactgaattattttactctgtgtaataaataaagggcgcttagatgccctgtacacggcgaggctctccccccttgccacgcgtgagaacgtaaaaaaagcacccatactcaggagcactctcaattatgtttaagaatgcatttgctaacctgcaaaaggtcggtaaaagcctgatgctgccggtatccgtactgcctatcgcaggtattctgctgggcgtcggttccgcgaatttcagctggctgcccgccgttgtaagccatgttatggcagaagcaggcggttccgtctttgcaaacatgccactgatttttgcgatcggtgtcgccctcggctttaccaataacgatggcgtatccgcgctggccgcagttgttgcctatggcatcatggttaaaaccatggccgtggttgcgccactggtactgcatttacctgctgaagaaatcgcctctaaacacctggcggatactggcgtactcggagggattatctccggtgcgatcgcagcgtacatgtttaaccgtttctaccgtattaagctgcctgagtatcttggcttctttgccggtaaacgctttgtgccgatcatttctggcctggctgccatctttactggcgttgtgctgtccttcatttggccgccgattggttctgcaatccagaccttctctcagtgggctgcttaccagaacccggtagttgcgtttggcatttacggtttcatcgaacgttgcctggtaccgtttggtctgcaccacatctggaacgtacctttccagatgcagattggtgaatacaccaacgcagcaggtcaggttttccacggcgacattccgcgttatatggcgggtgacccgactgcgggtaaactgtctggtggcttcctgttcaaaatgtacggtctgccagctgccgcaattgctatctggcactctgctaaaccagaaaaccgcgcgaaagtgggcggtattatgatctccgcggcgctgaccagcttcctgaccggtatcaccgagccgatcgagttctccttcatgttcgttgcgccgatcctgtacatcatccacgcgattctggcaggcctggcattcccaatctgtattcttctggggatgcgtgacggtacgagcttcagccacggtctgatcgacttcatcgttctgtctggtaacagcagcaaactgtggctgttcccgatcgtcggtatcggttatgcgattgtttactacaccatcttccgcgtgctgattaaagcactggatctgaaaacgccgggtcgtgaagacgcgactgaagatgcaaaagcgacaggtaccagcgaaatggcaccggctctggttgctgcatttggtggtaaagaaaacattactaacctcgacgcatgtattacccgtctgcgcgtcagcgttgctgatgtgtctaaagtggatcaggccggcctgaagaaactgggcgcagcgggcgtagtggttgctggttctggtgttcaggcgattttcggtactaaatccgataacctgaaaaccgagatggatgagtacatccgtaaccactaatccgtaagacgttggggagactaaggcagccagatggctgccttttttacaggtgttattcagaattgatacgtgccggtaatgctgaaattacgcggtgtgccgtagacgatagaaccttccacgttggtatcgtaggttttgtcgaacaggttattgacgttcccctgtaagctgaagtttttcgtcacctggtagcgggtgaagagatccaccagcgcgtagctaccttgctcggcgcggaaggtgccatacggcgtcacggtgtcggtatacacgcgattttgccagttaacaccaccgccgaccgtcaactctggcatgacaggcaaccgatagctggtgaacattttaaccgtggtgcgtggcagattaggattaacggcgtttccttcgttatcctctgcaatatagcgcgttgcgccaaatgtcagctgccagttgtcggtaattgcgccgttgagttcaaattccacccctttactgactgtcccatccaccgctttataggcggtttcgccgttgctgccggggataggtgtaccggtggactgagcgacattatcctgctcaatacggaagatggctaacgtggtggtcagacggctattcatccagtcgcttttcagacccagctcgtagttgttaccggtgattggagccagatatttgccactactgtcacgatcattttgcggctggaaaatagaggtatagctggcgtaggtgctccagttgtcattgatgtcaaacaccagaccagcgtaaggcgtggtgtggtttttctccatgctgtaagtcagcgtatcaacccgccagttggtataacgtgcgccgaggatcagatgcagcggatcggcaagggtgacacgagtggcagcatataagcttttcatatgtgtggtatcgtcctgcgccaggctctgtggactccagtcggtttgtgggaaattgccattaaagttgtagaaactgccaatttcatccgggaagatgttggcccaactactgaagtaacgattgttttgtttgctgtaactgccaccaaacattagattgtgctgacgaccaaacaattcataactaccgtcagcgaacaaatccagcgcatcaactttacgtttgccactgttccaaccggtgccgccgacataatcaaagccaggtccataattactgtatggcccaaccagcataccatccgctttgtttacataggcatcgacatacatcattttgctgtcaaattcgacttcagagtgggtggcattcagtgtcgcttgccaggtatcagcaaactgctgcttcagggtcataaagaccttgttgatctctttatcgttgtacgcccagtcaggtgcggtactgcgtgcgcgatcgtaactgttgctgctgccatcagtattccagcgcggtaaaccgccccaggtagggctattaacatcaatgcgctgatattcgtaaccggcactaagcgtcgtaagatcgcctaaatcagcatcgacaatgccgctgaagaaggtcttttcactgttgtagcggtccagccaactgtcgttattctggtagccgccgacaattcgcgcgcggattttaccgtcttcggtgagtgggctttgtaaatccgccacataccgttctttgttccagctaccgtattccgcgctgacatcgcctttaaattcacgactggtcgcgtgttttcgaaccatattaattgccgcagatggattacccgtcccggtcatgagtcctgtcgcgccacgcactacttctacgcgttcaaagagtgccatatcagaaagtgcgtcgcccagattccagcggctttcaaaataggtggggataccatcaaccatatagttatcgatctggaatccgcgggaataataaagagcacgatcggaatccgcctgacttttgctgatccccagcgtgttttccatcacttcgcccagcgtttgtaactgctgatcttccatccgctgctggctaacaatagtgacgctctgaggaatatcacgttgagtcatctgcattttggtacccgcagaggtagacgttacgctgtaatcattttcgccatcatctggagctgtggcactaccctcaacaatcaccgtttcttcagtggctggtgcagcaaaagcggcagaaggtaatagtgccagtgctatgcaaccggcaagtagactcggtttggtgatggcttgatattgattatccctgttaaattgtgtactaagcatttgaaatctcttggtttatgttgtcgtcaggctcatgccggaggagggtgatgagcgattatatttagtgtgcgaataattttgtttgtaaatgcaaatgagaaatatacgcattcatatttgtcatgtaaaccaaacagagaatgtcttttcagcgcattcgcaggcagaaatgggaataatggcgatatatacggcagcaaaacgattttttgcttaagaaatcgtgagttaaggttgaaagagcaggtttaactcgaccatactctatactcgcagtgtggcgcggcgtagcatggcgcaacgcatggctatttgaaaaaggaaaatgtcgtggcagaagaaactatattcagcaaaattattcgtcgtgagatcccctccgatatcgtctaccaggatgatctggtaacggcgtttcgcgatattagcccgcaagcgccaacgcatattctgatcattccgaatatcctcattccgactgtgaacgacgtcagtgctgagcatgagcaggcgctgggacgcatgatcaccgtagcggcaaaaattgctgagcaagaaggtattgccgaagatggctatcgtctgatcatgaataccaaccgccatggcggacaagaggtttaccacatccatatgcacttgttgggtggccgtccgctgggaccaatgctggcgcataaaggtctgtaacgatgagaaaaggatgctttgggctggtgtctctggtgttgttactgctggtgggctgtcgtagtcatccggaaattccggtgaatgatgagcaaagcctggtgatggagagttctttattggctgcgggcatcagtgcagaaaagcccttccttagcacgtctgatattcaacctagtgcatccagtacgctttataacgaaaggcaagaacccgttaccgttcattatcgtttttactggtatgacgccagagggctggagatgcatcctctggaaaggccacgcagcgttaccattcccgcacatagcgcggtaacgctgtacggcagcgccaattttctgggggcgcacaaagtcagactttatctatatttgtaaggggtgaatcttgatgacaaaaatgagtcgctacgccttgattaccgcgctggcgatgtttctcgccgggtgtgtggggcaacgtgaacctgcaccggtagaagaagtgaaaccagcgccggaacaaccagccgagccacaacagcctgtccccacagtgcccagcgtgccgacgatcccgcagcagccaggcccaattgagcacgaagatcaaactgcaccgcctgcgccgcatattcgccattatgactggaatggcacaatgcagccgatggtcagtaagatgcttggggctgacggggtgactgcgggtagcgtcctgctggttgatagcgttaacaaccgtactaacggtagcctgaatgccgcagaagcgaccgaaacgctgcgaaatgcgctggctaataacgggaaatttaccctggtttccgcccagcaactgagcatggcgaagcaacagttaggtttgagcccgcaggacagtttaggcacccgtagtaaagccataggcattgcccgcaatgtcggcgctcattacgtgctgtactccagcgcctctggcaacgttaacgctccgaccctacaaatgcagctgatgctggtgcagacgggcgaaattatctggagtggtaaaggtgccgttagccagcaataagtaaaattatctggtcaggtaaaggtgccgtttcgcagcaataatcccatcacgcgcgacgaattgctgagccgctttttcccgcagtatcatcccgtcacgacgtttaatagtgggcttagtggcgggagttttctcattgaacatcagggccagcgttttgttgtgcgtcagccgcacgatcctgatgcgccgcagtccgcgttcttgcgccagtatcgggctttaagtcaactacccgcatgcattgcaccgaagccgcatttatatctccgtgactggatggtagtcgactatctgcccggcgcggtaaaaacgtatttgccggataccaacgaactggcaggcttgctgtattatctacatcaacaaccacgttttggctggcgaataacgctgttgccgttactggaactgtactggcagcaaagcgatccggcgcggcggacagtgggttggctgcgaatgttaaaacgtctgcgcaaagcgcgggaaccacggcctttacgcttaagtccattgcatatggatgtccacgccggaaatttagtgcatagcgcgagtgggttaaaactcatcgactgggagtatgccggagatggtgatatcgcgctggaactggcggcggtgtgggtggaaaatactgaacagcaccggcaattggtcaatgactatgccactcgcgcgaagatttatccggcgcaattatggcgtcaggtcaggcgatggtttccctggctgctgatgctcaaagcagggtggtttgagtaccgctggcgacaaaccggcgatcaacaatttatcaggctggccgatgacacctggcggcagctattaataaaacaataaggagagcagtgtgggtccagtaatgttggatgtcgaaggttacgaactggacgcggaagagcgtgaaatactggcgcatccgctggtgggagggctgattctctttacgcgtaactatcatgatcctgcccagttacgtgaactggtgcgccagatccgcgcagctagccgcaatcgtctggtggtggcggttgatcaggaaggtggacgcgtgcagcgttttcgtgaaggttttacccgcttgccagcggcgcaaagtttcgctgcgctgagtggaatggaagagggtggcaaactggcgcaggaggcaggttggttgatggccagcgaaatgatcgctatggatattgatatcagctttgcgcctgtgctggatgtcgggcatatcagcgcggcgattggcgagcgttcttatcatgccgatccacaaaaagccctggcaattgccagccggtttattgatggtatgcatgaagccggaatgaaaacgaccgggaaacacttcccaggacacggtgcagtaacggcagacagtcacaaagaaacaccgtgcgatccacgtccacaagcggagattcgcgctaaagatatgagcgtcttcagttccttaatccgcgaaaataaactcgacgccattatgcctgcgcatgtgatctacagtgatgttgatccgcgtccggcgagcggttctccctactggctgaaaaccgttttgcgtcaggaactgggttttgacggcgtgattttctctgacgatttaagcatggaaggtgccgcgattatgggcagttatgccgaacgcgggcaggctagtctggatgcgggttgcgatatgatcctggtctgcaataatcgtaaaggggccgtcagcgtgttagataatctgagtccgatcaaggcagaacgtgttacacgtttgtatcataaaggtagttttagccgacaggaactgatggacagcgctcgctggaaagcgatcagcacccgtctgaatcagttacatgaacgctggcaggaagagaaagcaggtcactaaccctggcttatgtgaggaagcgatgattatctatttacacggttttgactctaacagtccgggtaaccacgagaaagtcttacaattgcagtttattgacccggatgtacgcttgataagctacagtacgcggcatccgaaacatgatatgcagcatctgcttaaagaagtggacaaaatgttgcaactgaacgttgacgagcgtccgctaatttgcggcgttggcttgggcggatactgggcggaacggattggttttctttgcgacatccgccaggtgatcttcaaccctaatttgttcccttatgagaacatggaaggcaagattgatcgcccggaagagtatgccgatattgccactaagtgtgtgaccaacttccgtgagaagaatcgcgatcgttgcctggtgattttgagccgtaatgatgaagcgcttaacagccagcggacatctgaagagttgcatcattattacgagattgtctgggacgaagagcagacgcacaaattcaagaatatctccccgcatttacagcgcattaaagcgttcaaaaccctcgggtaaatgccctcgtcgcatcaggtaaccttgccggtacctgatgcgctccgaattctgtgggtcggataaggcgtccacgccgcatccgacagtcgagcatcaatgcctgatgcgcttcttatcaggcctaccgaacgccctgcatacacccctcactctatatcactctcacaaattcgctcaaataataaacaataaactctgttttttgatctcacccggtaaagtcgcctatcttttcagcaacaaaacttgattaacatcaattttggtatgaccaatgcaccattcatgttattctcaatagcgaagaacattttcattgctgtaacctgttgttaattaagagctatgttaataaccattaattaacaattggttaataaatttaagggggtcacgttgactacgccattgaaaaagattgtgattgtcggcggcggtgctggtgggctggaaatggcaacacagctggggcataagctgggacgcaagaaaaaagccaaaattacgctggtcgatcgtaaccacagccacctgtggaaaccgctgctgcacgaagtggcgactggcagccttgatgaaggcgtcgatgcgttgagctatctggcccatgcgcgcaatcatggtttccagttccagctgggttccgtcattgatattgatcgtgaagcgaaaacaatcactattgcagaactgcgcgacgagaaaggtgaactgctggttccggaacgtaaaatcgcctatgacaccctggtaatggcgctgggtagcacctctaacgatttcaatacgccaggtgtcaaagagaactgcattttcctcgataacccgcaccaggcgcgtcgcttccaccaggagatgctgaatttgttcctgaaatactccgccaacctgggcgcgaatggcaaagtgaacattgcgattgtcggcggcggcgcgacgggtgtagaactctccgctgaattgcacaacgcggtcaagcaactgcacagctacggttacaaaggcctgaccaacgaagccctgaacgtaacgctggtagaagcgggagaacgtattttgcctgcgttaccgccacgtatctctgctgcggcccacaacgagctaacgaaacttggcgttcgcgtgctgacgcaaaccatggtcaccagtgctgatgaaggcggcctgcacactaaagatggcgaatatattgaggctgatctgatggtatgggcagccgggatcaaagcgccagacttcctgaaagatatcggtggtcttgaaactaaccgtatcaaccagctggtggtggaaccgacgctgcaaaccacccgcgatccagacatttacgctattggcgactgcgcgagttgcccgcgtccggaagggggctttgttccgccgcgtgctcaggctgcacaccagatggcgacttgcgcaatgaacaacattctggcgcagatgaacggtaagccgctgaaaaattatcagtataaagatcatggtagcctggtaagcctgagcaacttctccaccgtcggtagcctgatgggtaacctgacgcgcggcagtatgatgattgaaggacgaattgcgcgctttgtatatatcagcctataccgaatgcatcagattgcgctgcatggttactttaaaaccggattaatgatgctggtggggagtattaaccgcgttatccgtccgcgtttgaagttgcattaatcgacgtacactggcggatgtggcataaacgcctcatccgcccttgaggaacagcgcgatcggcagccgcgttgtatcaggcatcctttcagactcctccgaatccttaagtatttccagccattcccgcgcttttcatcttctgtctgatagctgcttttctccttcgcttgcatgattggcataactgcaaagaaggaggtgttcccgtaaataaaagtatgttggcgggtatcgggattggtgtcgcagctgcgctgggcgtagcggcagtggccagtctgaacgtgtttgaacggggcccgcaatacgctcaggttgtttctgcaaccccaatcaaggaaacggttaaaacaccgcgtcaggagtgtcgcaacgtcacagtgacccatcgtcgaccggtgcaggatgaaaatcgcattaccgggagcgtgctcggcgctgttgctggcggcgtgatagggcatcagtttggtggtggtcgcggtaaagatgtcgccactgttgtgggggcgctgggtggtggatatgccggtaaccagatccagggctctctccaggaaagcgatacttacacgactacgcaacagcgttgtaaaacggtgtatgacaagagtgaaaaaatgctcggttatgatgtgacctataagattggcgatcagcagggcaaaatccgcatggaccgcgatccgggtacgcagatcccgctagatagcaacgggcaactgattttgaataacaaagtataacaaggctgtactctgcaatttggcccctcattcgctcaggctgaggggctttttttgcgacttatttcaccagttcgggccataaacgcaaagtcgttccggcaatctgcatcagtttttccaggcttgcaccttcgcgtgcgctgatgctcatcccctgaataatacaattaaggaattctgccagatgtgtcacgtcacagtggggcgggatttccccgcgcgcttgtcgttgacataaaaactgctgcaaagtgcgctcttgcatcgcatggcgacttttcaacgtattggcgatatctccactatctggggagagggtggtgcagttgttgatcatgaagcagcctgccggggtgtctttgctggtaaagcagttggcgatggcagcaaaatagtcagccagcgcagactccacgcttttctcttcacaaaacagctgtgcttcatgcttagcggcaaaacgatcgatatagcggtcgagaacggcacgaaataacccctctttgttggtaaattccgcgtatagcgtgggcgctttggctccggtcgcttcgacgaggtccgcaagagaagtcgcttcataaccgtgttgccagaacaatttcatggccttatcaagcgcggcatccctgtcgaacacttttgggcggccacggcttttttttacacattgtgtactgtcagttgccatgatgccgttgtacctggtgactgtgaatgaaaggttattataaaaataatcacctccgttcaccagtccagatcccataaaaataattgctttctatttaactgaaatttaaagatttttaaattaattaatgattgttataaaaaatatcttgtatgtgatccagatcacatctatcatttagttatcgatcgttaagtaattgcttgcgacgtcattcatctgcataaggccactattatgaaaaacgtaaaaaccctcatcgctgcggcgattttaagctccatgagttttgccagctttgcggctgtcgaagttcagagtacgccagaaggccaacaaaaagtcggtacaatcagtgctaacgcggggacaaatctgggaagcctggaagagcagctggcgcaaaaagcggatgagatgggcgcaaaatctttccgtattacttctgtaaccggtccgaataccctccatggaacagcagtaatttataaataagcattaaccctcattaatgcctgctactgctgattttttccccgcgacatgccgtgtcgcggggatttttttatccgggctttacagcgtttgtgggctcacttgatgacggcggacatccaccggcatcccggaacggacatccatcacatgttgcatcacttcagcgtcagtttgtgctgcatctttaaaactttgcattgcgctattcagcgtaattggcagcagctgcggatcgtcatcaatcttctcactcagcggctgatgtacttcaaccagacgcgcaccgtttggttcggcagagacttttatcggagtgttgatgatattcactttggtgcctggggtgacctggctaaagagtgttttgatatcgtcatcccgcagacgaatacagccagaacttacccgcatgccaatgccgaaatcggcgttcgtaccatgaagcaaataaacgccgccataggccgccagacgaatcgcatgatggcccattgggttatccagtccagccggcactaccgcaggcaactcaattccctgtgctttataacgggcgcggatgtttgccgttggcgtccaggttgggtttgcacgtttgtcactaacggtggtcaccattgtcggtgtcagcgtgtcaccacctaactgaccaatacctattggatacacggttacgctatttttacccggcgggtagtaatagagacgcagctccgcaatgttgatcacaatgccttcgcgcggcgcatctggaagtagggtttgcaacgggatcgttaacacgctgcccgcgcgcggtacgtaaggatcaacgccggggttagcctgtaacagagcgagaaagccgacgttgtattttttggcgatggcttccagagaaccaccgtcattttccaccacatgaaatttgttttcgccaaccagacgactgcccgctggcggcagcggccaggtgttggcttttgccggtagcgccagcgccacggcagcggcgaacgtaaaaaacgttagccagcgagaaaaacgcgttttgatcatcaccaaaaatccataataaatataaggttattgtaataaacagataagcctgaattatggatggtgacagtgtcggatagtgcagggaagtgcaaagaatttgtaaatgttgcagatgggggcgcagaaacgcccccgatttaccattaagcgatcgcgttctcttccagttcacgcataaactggcgtacccattcgatacgcgttttccgctcactcaaatcctgaataaatttcaggcgcgtcggaccatcaaggcggtaatgctgcggctgtttttgcagcaaaccaatcaaccaggccggattaacgtgattcttctcggcaaattcgatcaccccgcctttctcattaccttccagcttcctgatccccagtttctgcgcttgctggcgcagacgggcaatatccagcagggtacgcgccggatctggcagcaggccgaagcgatcgataagctcgactttgatctcttccagttcgttttccgttttggcgctggcaatacgtttgtagaagctcagacgcgtgttcacgtcagggatgaaatcatctggcaataggctcggcatccgcagctcgacttctgtttgctggctggtgagatcttccaggctcggctcgcgtccggctttcagtgcatcgacggcgttttccagcaactccatatacaggctgaaaccgatggtttccatactgccgctttgttcttcgccaagcagttcacccgcgccgcgaatctccagatcgtgcgttgccagcgcaaaacctgccccgagatcttccaggctggcaattgcttcaagacgtttttgtgcatcggtagtcatcgcttttggatgcggtgtcagcaaccatgcatatgcctgatgatggctacgtccgacgcgaccgcgtaactggtgcagctgcgccagaccgaagtgatccgcgcgttcaatgataatagtgttggctgtcgggatgtcgatcccggtttcgataatggttgtacaaaccagcacgttgaaacgttgatgatggaaatcattcatcacccgttccagttcgcgctcgcgcatctgcccgtgaccgatggcgatccgcgcttctggcaccagttctgccagccgttcggcggctttctgaatgttttccacatcattgtagagataataaacctgtcctccgcgcaaaatttcacgcaggatcgcctcccggaccaccatgctgtcatactcacggacaaaggttttaactgccagacgacgggcgggcggcgtggcgataatgctcaggtcacgcattccgctcattgccatattcagcgtacgtgggatcggcgttgcagtaagcgtcagaatatccacgttcgcgcgcatcgctttaatgcgctctttatgacgcaccccgaagcggtgttcttcatcgacaatcagcaggcctaaatctttaaacttgacgtcactttgcagcagtttgtgcgtaccgatcagaatatcgattttcccttccgccacttccgcaaggatttgcgtctgctctttggcgctgcggaaacgggagatcatttcgatacgtaccggccagttggcgaaacggtcgcggaagttgtcgtaatgctgctgcgcgagaagggtggtaggcaccagcaccgccacctgcttgtggttatctactgccaggaaagctgcgcgcatcgccacttctgttttaccaaagccaacatcgccgcacaccagacgatccattgccagcggctgacacatgtcgctaagtaccgcattaatggcctgcgcctgatccggcgtggtttcaaacgggaagctgtcgcagaacaactgatactgctcacgatcgtgtttaaacgcgaagccctctttggcggcgcgttgcgcgtagatatccagcaattccgccgccacatcacgcactttttccgccgctttctgccgcgcgcgactccacgcatcgccgccaagtttatgcagcggggcgttttcttccgcgccacctgcgtaacggctaatcagatgcagactgctcaccggaacatacagtttggcgtcgttggcataggtgagcatcagatactcgccagtaatgccacccgcttccagcgtggtcattccggcataacgaccgacgccgtgctccagatggaccaccggctgaccaatatgcagttccgcaaggttacggatcagtgtatcggggttgatggtgcggcgagaatcctgacgacgacgggcaacgcgttcaccgagcagatcgctttcgcaaatcagcgccagattacgcaccgtatcgacaaaaccatgttcggcagcgccaatcatcagataacgcccacggtcgctggcttcatcaagacgcataatgcgttgcggagcaattttaattcgtgcgagcagttcacccagcgcttcacggcgaccttcactttctacgctgaacaccaccggaccgtcgaaagtctcgaggaacttacgcagcgcatccagcggcgctttttgttgtgcctgaacggccaggtctggcagtttctggaaacctaaattggcattcgcggcttttgtcggtaaatgttcagtttttagctgcacccggggccagtttttcagctcactgaagagctcgtccacccgcagccagaggctttgtggtggcaacagcgggcgcatcggatcgacgccgcgattctcaaaacgcgccagcgtgtcagcctggaaacgttcggcactggtttccagatcgccagtattcacgagcaaggtattggcagggaaataactgaacagcggcggcagtggttcgctgaagaacaatggctgccagtactcgatcccggcaggtaatgtgcctttactcacttgctggtaaatatgttctggatcgcgcttcacttcgaaggtatcgcgccactggctgcggaacagttcaattgccgctttatcggtcggaaattcgtgcgcgggcagcagattgatcgcttctacttcctccagcgtgcgctggctgtcgacgtcaaacacccgcaggctgtcgatttcatcatcaaagaaatcaagacgataaggcagctcactccccatcgggaagagatccagcaacgcgccgcgcgtggcgtattcgccgtgctccatcacctggtcaacatggcgataaccggcgctgtccagttgggttcgtaatgcatctcgactcaggcgctgaccttttttcatcaccagcgcatgaccgtggagaaaactgtgtgggcaaacgcgctgcataagcgtattcaccggaacaatcagtacgccacgctgcatcgtcggtagctggtaaagggtggaaaggcggctggagataatgtcctgatgagggctaaaactgtcgtagggaagagtttcccagtccgccagattcatcaccatttgatcggtaaactggctgatttcatcatgcaaacgcagagcattttgcatatctggtgcaatgagtaccaccggaccggcgtgacgttcggcaatttccgctaccagcgttgcacaggctgcgccggttaactcgcccagcagacgctgctcacccgctttgacgggcagcgtataacgatattgttcaggcataacggttgtcagattctcgttaggatatgcctcaacatatgggggcatatctctgataagcaatgctgttcattatccgtaatcgacatggtttagcaaattgaatcgccccggctggggcgatggcttagcgggagtaactgacggcagcgggcagactaggcggggagaacaacagatcgctgaatgcacgctgactaagttttcttaccagcaagcccgcaacagtacagatgaacaaactgacaaagggataaaccagcaggagtgtcagttcgacttgcgggctccagcgtgctgcgttcatttgcgcaagcagagttaagctgaatatttcaaccagaatgcgatgggtggtgtagatagcaatggtgttggagccaatcacattcagcaggctggtggagcgcataccgaatcgttgctcgtattgataaaacagcttcatgatcaccacaatgcttaccaggctcaacagcaggctgatagtaaacaaccaggcaccgaccgccagaacggtaagcaaagaagccatcagcagatggcggcgcaacggcacctctttaacacaggtcattattgttgcgccaaaccatgcgccaaggctgtaataaggcaaattgcggatcacactgttcattccccaccacggcgtgggaacgaaattaaccgccacactcagcagtacaaacaaggcgaatagtggcagcgccagacggctaaaaattttacataccacgaaatagacaattaacgcatacagataccacaagctggtgctggcggtgatcatcccgtgcaggaactcaccggtggaatcggcataagcggcattggaggcattgcttaaatcgcgctcaggtgccagccactggttcagcgcacttaacgccagccactgcaccacgccccaaagcgccagcacccagaagatgttccagatccgtttatcgagacaatttccccacggtacgctgtcgatatagcggcgaatcaaatagccggatataaagaaaaaaaccggcatacgaaagggggcaaggtaaagattgaaatagatccagcatttgctcaggacttcgcttaacggatgctgaaaagtggtcagatgcggataaaaggtaatgacgctgtgataaatcaccaccagacaaatacataaccctttgatctggttaatccatagctctttttgtttcatcaggacaacacgctcttttttaatttacatgcggttgatcctgcgggttatgacccgaggtgtaatgggtatctgtctgtattggatgatttttcagattaagatcaggcggcaagattgatgataaaacatggcaatttagccgattgatttacgggggcttttcagattagccctgacgatcacttacagttcagacgtttacccatcttgctttcgcttatatactcgtgtctttgctacagcaaccagacggatttcatgtaccaacctgtcgctctatttattggcctgcgttacatgcgtgggcgtgcagcggatcgcttcggtcgtttcgtctcctggctttctaccatcggcattaccctcggggtgatggcgctggtcacagtattgagtgtgatgaacggctttgagcgcgagctgcaaaacaacatccttggcctgatgccacaggcaattctctcttctgagcatggctctcttaacccgcagcaactcccagaaacggcagtcaaactggacggcgttaatcgcgtcgcacctattactaccggtgatgtggtactgcaaagcgcgcgcagcgtggcggtcggggtgatgctcggtatcgacccggcgcaaaaagatccacttacaccgtatctggtcaatgtgaaacaaactgacctcgagccggggaaatataatgtcatcctcggcgaacaacttgccagtcagctaggcgttaatcgcggtgatcaaatccgcgtgatggtaccatctgccagccagttcacgccgatggggcgtattccaagccagcgcctgttcaatgtgattggcactttcgccgccaacagtgaagtcgatggctatgaaatgctggtgaatattgaggatgccagccgtctgatgcgttatccggcaggcaatattaccggctggcgtttgtggctggatgagccgctgaaagtcgacagtttaagtcagcaaaaactgcctgaaggcagcaaatggcaggactggcgtgatcgtaaaggcgagttgttccaggccgtacgcatggaaaaaaatatgatgggtttactgctgagcctgattgtcgccgttgcggcgtttaacattattaccagtctagggctgatggtaatggagaagcagggcgaagtagcgatcctgcaaacgcaaggcttaactccgcgacaaatcatgatggtctttatggtgcaaggggccagcgccgggattatcggtgcgatcctcggagcggcgcttggcgccctgcttgccagccagttaaataatctgatgccgataatcggcgtcctgcttgatggcgcggcgctgccggtggctatcgaacctttacaggtcattgttattgcgctggtggcgatggctatcgcgctgctgtctacgctttaccctagttggcgcgctgccgccactcaacccgctgaggctttacgttatgaataagatcctgttgcaatgcgacaacctgtgcaaacgctatcaggaaggcagtgtgcaaaccgatgtgctgcacaatgtcagtttcagcgtcggcgaaggtgaaatgatggcgatcgtcggtagctctggttccggtaaaagtaccttgctgcacctgctgggcgggctggatacgccaacctccggcgatgtgatttttaatggtcagccaatgagcaaactgagcagcgcagcgaaagctgaactgcgcaaccagaagctgggctttatttatcagtttcaccacctgctgccggattttaccgccctggaaaacgtggctatgccgctgctgattggcaagaaaaagcccgctgaaatcaacagccgtgcacttgagatgttaaaagcggtggggctggatcatcgtgcgaatcaccgcccatctgaactttctggcggcgaacgccagcgtgtggcgattgcccgtgcgctggtgaataacccgcgcctggtactggcggatgaacctaccggtaacctcgatgcgcgtaacgccgacagcatcttccagttgcttggggaattgaatcgcttgcagggcaccgccttcctggtggttactcacgacctgcaactggcgaaacgtatgagccgccagttagaaatgcgtgatggtcgtctgacggcggaactgagcctgatgggggcggagtaatggcgatgcctttaagcttattaattggcctgcgttttagtcgcggacggcggcgcggcggcatggtgagcctgatctccgttatttctaccattggcattgccctcggcgtggcggtattgatcgtcggcttaagcgcgatgaacggctttgaacgcgaactgaacaaccgtattctggcggtggtgccgcatggtgaaatcgaggcggtggatcagccgtggactaactggcaggaagcactggatcacgtgcaaaaagtgccgggtattgccgctgccgcgccgtatatcaatttcaccgggctggtggaaagtggcgcgaatcttcgcgcaatccaggtgaagggcgttaacccgcaacaggaacagcgtctgagcgcattacccagctttgtccagggcgatgcgtggcgcaattttaaagcgggcgaacagcaaattatcatcggcaaaggcgtggcggatgcgctgaaagtgaagcagggggattgggtgagcattatgatccccaacagcaatcccgagcataaactgatgcagccaaaacgtgtgcgtttgcacgttgccggtattttgcagttgagtggtcaactcgatcacagttttgccatgatcccgctggcggatgcccaacaatatcttgatatgggttccagcgtgagtggtattgcccttaaaatgacggatgttttcaacgccaataagctggtacgcgatgcgggtgaagtgaccaacagctatgtttatattaaaagctggattggtacttacggctatatgtatcgcgatatccaaatgatccgcgccattatgtatctggcgatggtactggtgattggcgtggcctgtttcaacatcgtctccaccttagtgatggcggtgaaagacaagagtggcgatatcgcagtattaagaacgctgggggcgaaagatggtttaattcgcgccatctttgtctggtatggattgctggcagggctgttcggcagcctgtgtggtgtgattatcggcgtagtggttagtctgcaacttaccccgattattgagtggattgaaaagttgatcggtcatcagttcctctccagcgatatctattttattgatttcctgccaagcgaattgcactggctggacgtcttctacgtactggtcacagcattgttgctgagtcttttggcaagttggtatccggcgcggcgcgccagtaatattgaccctgcgcgagtccttagcggccagtaaaggcagtacattaaaacaaggagcggcaatgtattacgggtttgatattggtggaacaaaaattgcgcttggcgtgtttgatagcggtcggcagttgcagtgggaaaagcgggtgccgacaccgcgtgacagctatgacgcatttttagatgcagtgtgtgagctggtagctgaagctgaccaacgttttggctgtaaaggttctgtcggcatcggtattccgggaatgccggaaacagaagatggtacgctgtatgccgccaatgtccccgctgccagcggtaaaccgctgcgtgccgacctgagcgcacgtcttgatcgcgatgtacgccttgataacgatgccaactgttttgcccttagtgaagcctgggatgatgaatttactcaatatccactggtgatggggttgattctcggcaccggtgttggcggcgggctgattttcaacggcaaaccgattaccggtaaaagctacattaccggcgagtttggccatatgcgtctgccggttgatgcgttaaccatgatggggttggatttcccgttacgccgctgcggctgtggtcagcatggctgcattgaaaattatctgtctggtcgcggttttgcgtggctgtatcaacactattatcatcaaccgttgcaggctcccgaaattattgcgctttatgatcaaggcgatgagcaggcaagggcgcacgttgagcgttatctggatttattagcggtttgtctgggaaatatcctgaccatcgttgaccctgacctggtcgtcattggtggtggcttaagcaatttcccggcaatcacaacgcaactggcggacaggctgcctcgtcatctcttacctgtagctcgtgttccgcgcattgaacgcgcgcgccacggtgatgcgggaggaatgcgtggtgcggccttcctacatctaaccgattaaacaacagaggttgctatgctgagccgtcggggtcatcggttaagtcgttttcgtaaaaataaacgccgcctgcgcgagcgtttgcgtcagcgtatttttttcagagataaagtggtgccggaagcaatggaaaaaccaagagtactcgtactgacaggggcaggaatttctgcggaaagtggtattcgtacctttcgcgccgcagatggcctgtgggaagaacatcgggttgaagatgtggcaacgccggaaggtttcgatcgcgatcctgaactggtgcaagcgttttataacgcccgtcgtcgacagctgcagcagccagaaattcagcctaacgccgcgcatcttgcgctggctaaactgcaagacgccctcggcgatcgctttttgctggtgacgcagaatatcgacaacctgcatgaacgcgcaggtaataccaatgtgattcatatgcatggggaactgctgaaagtgcgttgtagtcaaagtggtcaggttctcgactggacaggagacgttaccccagaagataaatgccattgttgccagtttccggcacccttgcgcccgcacgtagtgtggtttggcgaaatgccactcggcatggatgaaatttatatggcgttgagcatggccgatattttcattgccattggcacatccgggcatgtttatccggcggctgggtttgttcacgaagcgaaactgcatggcgcgcacaccgtggaactgaatcttgaaccgagtcaggttggtaatgaatttgccgagaaatattacggcccggcaagccaggtggcgcctgagtttgttgaaaagttgctgaagggattaaaagcgggaagcattgcctgatgcactacgcttatcaggcctgcaaggggacgcaattaattgaatttgcgggttttgtgggccggataaggcgttcgcgccccatccggaataatacacgcgcacttttccggcctcttttatcgtttactcgtcaataacaatgcggcaataaacgtacagacaccaattagccctgcccagagtgggcttattctggtaatcgcaaagctattatcgatatacaaacataaagcctgataacccatattggcaatagtcatcgccactgcaaattttaacgcataaataaaacgagtcgtgtagtaaaagatcctggaaaataagataaacgtcgcagcccaggcgataaaacctaatgtgttggtgctgccggggggagcattttcatgctgttgtcctggatgcggataatacgttagtggcggcgtgctttgttttaatatctgtgcttgtagaacagccaatgcattattgattccctgataccagagatctgcatttaaataagccagcgtgtgattttctatcagaaggccgagatgtttatcgtccagaccactttcaacctggccgttggtgatcataattaaccgtggttcgcgggtagtaaatagtaacagaacacttccttttacatcactcaaactagaactcgcatgcgccagcatcgctttaccattttgtctgagactggcttcattattaatgtcgggtaaaaccacaataaacggtgcaattcccgtttgttggcgaaaaagctcggctttatgcgcgatctcttcagcatctggtacagtaccggtaacgtccgtaaaaagtgtcttcattattggaattaatggcttgctggctgctgtcagaggcaggagtatcagtaaactgagcagtataatgaattttttcatgggcgggacttccgtttcctgcgactttttttagaggagggcatacttattaataaaccgacggcgataaaaataacgcccataatgccgataaacccccatttaaaaaaattaacccacgggttatttatctcagccttttcaggatgcccgggagaataataaacattaactttatcgccttcgctgtcttcataaaaatcgctgccgatactgctattgaaaattagcgtgtaatctggcgtcggtcgaaaggcaacgacgggataccagctaccatctttacccgtgcgatgagaatgactggagtgccagacggtatcaacaatgacgccttcggtatgaatcgcgtctttgctataggtgaactggttataaaagacaacaacagaaatgaggatcagtaccagaccgataccgaggaatatacgaaagaaaactttactgtcctgactcattagccacatccttgctaactaaaaaacgggcggtaataccaccgcccgcttgctgaattaacgtcctgctttcagcttctgataatactcttcataaatgctgctggctgcgccaacgtcattctgccattcgccatttttaatggtttcagcatccgggtagagtgttttatcgttcgccacttctggacttaacagcttacgcgccgcaaggtttggcgttggataaccgatagtttcagcaacctgttttgccacatccgggcgcagcaggaagttgatcaatttcagcgcgccttctttgtttttggcatttgccgggatcgccaggctgtccatccagaaaatgccgccttctttcggccacaccacgtcaattggcgtacccgcctggcgtgcaacgaaagcagaaccgttccagatcatgccgaggttaacttcgccttccatgtacgggttcgccgggttatcggagttaaaggctgccacgtttggcatcagttttttcagctcgttatatgcagcttcaatctctttcggatcggtggtgttaccggagtagcccagcttacgcagcgccatctggaacacttcacgggcatcgtcggtcaacagcaggctgcctttgtactctggcttccacagatcggcccagctggtgacagatttcggatccaccgcatcaccgttaacaccaatcgccgtcgcaccccagatatacggaatggagtagtcgttattcgggtcaaaaggcttgttgagcatgtctggatcgagattgctgaagtttgttaacttgctcttgtcgatcttctggatcatcccttctttacgcattttatcaacgtaataggtactaggaaccaccagatcataggcaccgtctttgtatgttttcagcttggcgtacatggtttcgttgctctcgtaagtgctatagataaccttaataccggtttctttggtgaactgttcaagcagtcctggcggcacgtactcggtccagttgtagaaatacagcgtgttgttgtcatcggcgtgagcggcgctcatgcccagtgccagagcacccgccgcgagcaggtggcgactccattttttcatttaacgtcccctgtgttacctttcgttttatcacgagcaataagctggctggcaataaccatcaccaggctcagcaccagtaatatggttgccagcgcgttaacttccgggcttacgccgactttgaccatgctataaatttttaacggcagaatttcataacttggtccggtgacgaagctagaaactaccacatcgtccatgctcagggtaaagcttaacacccagcccgccgccaccgctggcattgccagtggcagaatgatttttcgcagaatggtaaattcgctggcaccgagatctttcgccgcttccagcattcgcacgtcaaaacctttcaggcggctatacaccgtcaccaccacaaatggcaggcagaaggtgatatggctgaacagcaggctccagaagccaagctgaatacccagcagcataaacagcaccagcaggctaatcgccatcacgatatctggactcatcatcaccacaaacagcattccgctaacgaacggcttaccacgaaagcgataacggtacagcgcaactgccgtcagactaccgataagcgtagcaaacgtcgcgctaaacaccgccattgttagactatgctgcgctgcctgtaacaggctgtcgttgttcatcagcaggctataccatttggtggtaaagccctgccagttgatgccaaagcggctgctgttaaaggagttcacaatcaaaataatgattgggatatacaggtacgcgtagatagcggtcataaaaccgccgcgaagcagtcgaccgatcattcgagttccaccttcttattcagcaaacgagaagcgcgccagtaaaccagcaacatcaggcccattacgatagtcagcgtaatgctggtagctgcaccaaacggccagtcacgaatattaaggaactggaccttgatgacgttaccgatcagcaggtttttcgcaccgcccatcaggtcggatacatagaacaggcccatcgctggcagcatcaccagcagacatccggcaataattcccggcatcgtcagtggaataatgatacggataaaagtctgtaacttgctggcaccgagatcgcgcgccgcctcaagcaacggcttatccagtttttcgatactggagtacagcggcatcaccataaacggcagcagaatgtaaaccagaccgataatcaccgcactgggcgtgaacatgatacggattggtgtgtcgataacgcccagccagagcaaaaactcgttgagatagcctttggtgctgaggaaaattttcagcccgtagatacgaattaaactgttggtccagaacggaacaatcagcagaaacagcagcagcggacgcaccttgtgtggcaacttcgccagaaaccaggcaaacgggtagcccagcaccaggcaggcgagggtggcgatcagcgccatattcaggctgtgcaatagcacttcaaaatagagcggatcgagcagacgcgtgtagttatccagcgtaaagaccattttgacaaaactggcgtcgtcgcgggtcaaaaagctggtgccaatgatcatcaggttgggcagaaagacaaacaacacaagccaaccgacaatagtgacaatcactacattctggaacttacttgtgttcttcatcagccagtacgacctcccagctttctacccaattaatggccattttttggtcgagagagtggtcaaagtcaggatcgtcttcattgaagaattcgctgaccatcaccatcttgccattttccagttcaacaacgctctccagcgtcatgcctttgtagttacgctcgcgaacgtaaccaatcagcccttcagcgtggttgtcgtcgttaatctcttcaacacgtaagtcttccgggcgcagcagaacatgcagtttttgccccggttcaacggcgaagttaacgtagatattacattcgcggccttcaacgttggcgcgtacgcgctgctcgtctagacgttcgatgacagtggcgttaaacatattgatttcgccaatgaagccggcaacaaacaggtttttcggctcttcgtagatttcacgcggcgtgccgtcttgctcaatgcgaccatcgcgcatcaccacaatcctgtcactcatggtgagtgcttcttcctggtcgtgagtcacaaagacgaatgtaatgccaagcttacgctgtaacgctttcagctcgttctgcatttgcttacgcagtttgtaatccagcgcactgaggctctcatccagcaacaacagacgaggcttgttaaccaccgcgcgagcaatggcgacgcgttgctgttgaccaccagagagctgatgcggtttgcgttgagcgaaggtttccaactgcaccatccgcagggcttccatcacgcggggcgtaatttcagcagcgggggttttttgcatgcgcaacccaaaggccacattttcgaacacggtcatgtgggggaaaagtgcgtagctttggaaaacagtgttcacatagcggttttccgccggaacgtgggtgatgtcctcgttatccagcatgatgcgtccggaatcaacagtttccagacctgcaatcaggcgaagaacggttgttttaccgcagccagaagggccaagcagcgtgaggaactcgccattgttgatagtcagatccagctggggaatgacctctttaccatcaaagcatttgcgaattcccgccaattgcaccagcggactaaggctactcggttgtttattcaattttttactctgtcccatgtaaacgcaacggatggcttaccgatgcggggtttgtggttaaccaccttggtgactcttaatgagggcggtaattctacggcaaaccgcttgaatcgccaatctttgttgtgaattactggcttagctttatattcattaaggtaatgctgataaatattcccgcttgcaggggtaaaagtgacctgacgcaatatttgtcttttcttgcttcttaataatgttgtcacaaaaagtgagggtgactacatggataaactacttgagcgatttttgaactacgtgtctctggatacccaaagtaaagcaggggtgagacaggttcccagcacggaaggccaatggaagttattgcatctgctgaaagagcagctcgaagagatggggcttatcaatgtgaccttaagtgagaagggcactttgatggcgacgttaccggctaacgtccctggcgatatcccggcgattggctttatttctcatgtggataccagtccggattgcagcggcaaaaatgtgaatccgcaaattgttgaaaactatcgcggtggcgatattgcgctgggtatcggcgatgaagttttaagtccggttatgttcccggtgctgcatcagctactgggtcagacgctgattaccaccgatggtaaaaccttgttaggtgccgatgacaaagcaggtattgcagaaatcatgaccgcgctggcggtattgcaacagaaaaaaattccgcatggtgatattcgcgtcgcctttaccccggatgaagaagtgggcaaaggggcgaaacattttgatgttgacgccttcgatgcccgctgggcttacactgttgatggtggtggcgtaggcgaactggagtttgaaaacttcaacgccgcgagcgtcaatatcaaaattgtcggtaacaatgttcatccgggcacggcgaaaggagtgatggtaaatgcgctgagcctggcggcacgtattcatgcggaagttccggcggatgaaagcccggaaatgacagaaggctatgaaggtttctatcatctggcgagcatgaaaggcaccgttgaacgggccgatatgcactacatcatccgtgatttcgaccgtaaacagtttgaagcgcgtaaacgtaaaatgatggagatcgccaaaaaagtgggcaaagggttacatcctgattgctacattgaactggtgattgaagacagttactacaatatgcgcgagaaagtggttgagcatccgcatattctcgatatcgcccagcaggcgatgcgcgattgcgatattgaaccggaactgaaaccgatccgcggtggtaccgacggcgcgcagttgagctttatgggattaccgtgcccgaacctgttcactggcggttacaactatcatggtaagcatgagtttgtgactctggaaggtatggaaaaagcggtgcaggtgatcgtccgtattgccgagttaacggcgcaacggaagtaagcgaaaagggatgcggcatgtgatgccgcatccggcttaaatccaaacttacccttcgaagaaccaatacccgctattgaccagcgccgcgagcatcgcgaggaaactcggatcttccagcgcatcgccaaaattctccgcagtcagcgcaatgttgctggcgagtgcatccagtgccggacggtgcggggaatcgatcttctcaccattggcatacacgtcgtcgccaatgcgcaatacgcgcagaccacccaggcgcaccagcacttcaccttgtttcagcgcatcgtagatttcatccggctgataaggcggctctggcggcgcgatatccagttcatgacgactctgggatataaactcgccaaaccattgcttaaagtgttccggctggttgatcaattcgagcatcatctcacgcagtttatccatctcttgcggcagaacatccgcaggatgagcgcgaggtggaacatccggatcgctgtagtagttgccgcccagttcacgttgcagcacataatcggcaaatccactaatcagttcccgcgtatttggcgcgcgaaagcccacggaatagttcatcgcattttccagcgcgtagccttcatgcgggaatcctggcggaatataaagaatatcaccaggctccagctcttcatcgatgatggcttcgaacggatcgacctgtaacagatccggatgtgggcagtgctgtttcatttgcagcttttcgcccactcgccagcgacgacgtccggtaccctgaatgataaacacgtcgtactgatcgagatgcgggccgacgccgccgccgggtacagaaaaagaaatcatcagatcatcaatacgccagtccggtagttcacggaacggtcgcatcagcgcggcggtcggctcatgccagtggttcactgcctgtaccagtaaactccagttggtttcaccgagatgatcgtagctttcgaacgggccgtggctgacctgccatttgccatcctggtgactgaccagtcgactgtcaacttcgctttccatcgccagacccgccaactcgtctggagagatcgggtcaataaaattattaaagccgcgttttaacaccaccgggcgtttctgccagtgacgttcaagaaaatcgggccagttaagagtgagttggtattccatgttaagcatccacaggctggtatctgcaaccgattataacggatgcttaacgtaatgcgtgaagtatgggcatatttattcatctttcggcgcagaatgctggcgaccaaaaatcacctccatccgcgcaccgcccagcatgctctctccggcgacgattttaccctcatattgctcggtgatttcgcgggctaccgccagccctacaccttgcccagggcgtaaagtatcaacccgttgaccacggtcgaaaatgacctctcgcttgcttaatggaataccggggccatcatcctcgaccacaatatagagatgctcgtcggtttgccttgcagaaatttcgacaaactcgaggcaatatttacaggcattatccagcacgttgcccatcacctcgacaaaatcgttctgctcaccgacaaagctgatctctgggctaatatcgagagagatattgacccctttgcgttgatacactttgttcagcgcactggtgagattgtccagcagtggggcgaccggatgcagctcgcggctgagcaatgtcccgccgcgcatactggcacgatgcaggtagtagccaatttgctgactaatgcggctgatttgctccagcattaccggctcagcatcactgacgctcatcttttcactacgcagagaacgcagcgtactttgcagcaccgccagtggcgttttcagactatgggtcaggtcggtgagcgtcgtacggtatttgtcgtaacgttcgcgttcactttttaacaatcggttcaggtttcgtaccagactggtcagttctcgcgttgtggctggattgagcaattcgcggttatgttcttccagttcgcggacttcttttgccagggcttcgatggggcgtaaactccaccaggcggcgacccacagcagcgggatcactaacagcagattggcactgagcacatagataaaccagctccagaccatataggaactttttagctccaccggaatggtatccaccaccacaatggttaattttggcatccggcttgttgccgggtagacgtttactgccacgctgtgggtcatctccgcgtcgtcatcatcttcccgcacttcctgcaactgttgctgtatgctatgatctccactcagcaagaggctggtatcgttaacatccgcttcaatttcatgaaaaccattgcttttcagccagtcaggctggatcatcttcatcagccagggcacgtcacgttgcgcccataaaagctgcccgttctcatcataaattagcgtcatggtggggctttgcttgtcgatattttcgggtaactcgacatgcaacttattgttttcccacttcgcaagggtatagaacagattgctctcgccacgtaacagccgaaacgtagttttatcgaaactgacgctataaccgatcagcgcgaccattccgtaggcaaggctaagcaccagtactaccgctgccgttgccaacagaaaacgtacccgcaggctgagcgggaaaaaaagacgcagtaattttttcatcagcgcaattcgaacagatagccctggccgcgaacggtggtaatcacttcttggggatattgtgcctgaatttttttgcgcagacgtcccatcagtacatcaatggtatggctttcccgcagctccgcatccggatagagttggagcattaagctatctttgctgaccactttgccattattgcgtatcaacgtttccataatagtgtattcgaacgcggtcagtttgatcacttcgtcattaatagataattcacggcgagagagatcaacctgaaacggggggaggctaatgacctgactagccagaccgctattacgccgcattaatgcctgcattcgcgccatcacctcttcaatatgaaacggtttagtcacataatcatcagcaccggcacttaatacttcgactttgtcctgccagctttcacgggcggttaataccagaatcggcagactaacatcgttgctacgccagcggcgaatcagactcagaccgtcctcgtctggcaatccgagatcgacaatcgcaatatccggtatatgttcattgagataataatcggcttctttggcatcttctgcgtcatcgacctgatgaccagcatcctgaatctgaactttaaggtggtgacgtaacaacgcattgtcttcaacaaccagtacgcgcatttttatttctccctgtcttaattattaaaatagtgtaacgcgattatgtggttatgggggtaaacattaaataaaccagcggggaggggaggtaaagtgaaaaaataaaaagcggataatcttaataagcaggccggacagcatcgccatccggcactgatacgaggtttatttcagctcatcaaccatcgtgatagctcgaccaatatagttagccggcgtcatcgctttcaggcgggctttctcttcttctggcaacgccagaccatcgataaactgcttcatgccttcggcgtcaacgcgcttaccgcgagtcagctctttcagcttctcgtacggtttttcgatgccatagcgacgcataactgtctggattggttcagccagcactttccagttgtgatccagttcatccagcagatggtcacggttcacttccagtttgctcacgcctttcagggtggattgatatgcaatcaaggcataaccgatacccacgccgaggttacgcagcacggtagagtcggtcaggtcacgctgccagcgggaaaccggcagtttgcttgccagatgctgcaataccgcgttggaaaggcccagattcccttcggagttttcgaagtcgatcgggttaactttatgcggcatggtggaagaaccaatctcaccagcaatggttttctgtttgaagtggttaagggcgatataaccccagacgtcacggtcaaagtcgatcagaatagtgttgaagcgcgcaacgcaatcaaacagttcggcaatgtagtcgtgcggttcgatctgggtggtgtacgggttccactgaatacccaggctggtgacgaactcttcgctgaactgatgccagtcaacttccgggtaagcggcgatgtgggcgttatagttaccgaccgcgccgttgattttgccgaggatctccacctggttaagctggcggtactggcgctccatacggtaggcgacgtttgccatctctttaccgatggtactcggcgtggctggctgaccgtgggtacgagacagcagcgggatatcgcgatactgaacggcgagatctttaatgccatcaatcagttgacgccagtatggcaggatcacttcatcacgcgcggttttcagcattaatgcgtgggagaggttattgatatcttcgctagtacaggcaaagtggatgaattcagaaaccgcgtgcagttccgggatctccgccactttttctttcaggaaatactcaaccgctttaacgtcgtggttagtggtacgctcgatagttttgatgcgcgccgcatcttcttcgctgaaactggcgacgattgcatcaaggtaaccgattgcgtcggcagcaaaagcaggaacttccttgatcgctgcgtgcgcggccagtttttgcagccaacgtacttcaacttgtacacggaatttcagcaaaccatattcgctgaaaatcccgcgcagcgcgctgactttatcgccgtagcgtccatcgacaggggaaacggcggtcagactggataattccatagatcacaactccggggttaaatgagcaagaatttgttttgcctgagtggtcaggcgattacgagaaaacatcagttgcagacgtccgccgccgacctggtgccagagcacggcggcgcgaatgcctgccagcagggttgcgcgaactttcgcctgcacttgtgggctttgcagtacagcaggggaaccggtgacctgaatgcgcgggccaagcgggctaatcacatcaacatagatagcagccatcgcgctcatcagcgtttcggactgtaaatcgaagtgttcgagctggcgttgcaggccgttgatccggttgcccagagtgtcgagcgcgcctttcgcactggagagtttgcgctcaagcaccatcaagctgagtgtgtagcgggttaattcggcgtttaagccctggcgactgctggcattgagcacgccgagcagggtttccagcccgacgcgcaggttggcttcgctaccgccaaaaaccgccagcgtgctgctggggttcatatcaataatactgttgagactgacgtgtagcgcatcggcatcacaatgcccctggtgagcgagttgttgcaccaggcgtgcgctctgacaaataccggccagggcgagggtgatgtcatagtaattctttgccacgttcactgcttccttgttttaagtaaagataataatcagaccggcagcggcagacgctgctcaataataccgccaccgaggcacacttcaccgttatagaagacggcagactggcccggcgtcacggcggcaaccggttcatcgaaaatcacttcaatgcgatcatcgtccagcgccttgacggtgcaagggatatcggtctggcgatagcgggtttttaccgtgcaacgcatagtgccggtgaatggttcgcgatcgacccagtgcaactgctgggcaatcaacccgacagacatcagccgcgggtgttcatggccctgagcgacaaccagaatgttgttttcgacgtctttgtccaccacataccacggttcttcggtaccttctttggtgccaccgatacccagacctttacgctgaccgagagtgtgatacatcagcccctggtgctcaccaatttcatcgccatcgacggtaatgattttgcccggttgcgccgggagataacggcccaggaactcgcggaatttacgttcgccaatgaagcaaatgccggtagagtcttttttcttcgcggtgaccagaccaagatcttcagcaatcttacgcacctgcggtttttccagttcgccgaccgggaacaggctttgcgcaatctgctcatggctgagcgtataaaggaagtagctctggtctttattgctgtccagaccacgcagcaggcggctcttgccatcgacatcggcccgacgtacgtaatgaccggtagcgatataatcggcacctaaatcttcggcggcaaattcgaggaaggctttaaatttgatctctttgttgcacagaatatccggattcggcgtgcgaccggctttatattcggcaaggaacagttcgaagacgttgtcccagtactcggcagcaaagttaacggtgtgcagttcaatgccgagcttgtcgcagacagcctgggcatcagccagatccgctgccgctgtgcaatattcctcaccgtcgtcttcttcccagttcttcataaacaggccttcgacctgatatccctgttgttgcaacagccaggcagaaacggaggaatcgacaccgccggacatgccgacgattactttttttgcggtttcagacattggatcactcacgacattgaacttcaaggcggcgtattctatcacgcagccttttagatgacaccctttgtaaaaggccagttaaaatcgccaatcatctccagcggataacgttgcccgctttgataacaacgaatactttccgccaccagcgggctacgaagattactcgcctgtaaaatttcttcggcgctgacccaacggcagcagtcgatatcgctgtcatgaggctgggtcgggcatatttgctcaagctcaatggcaaagaggaaacgcaaaaacggcgttttatctggcgcaatccactgatgcatacgaataaagtgttgcggctgcgcgctgatgccggtttcttcccacagttcacgggcggcggcttccactaaggtttcatcggcttccagatgcccggcaggttggttccataacgctttaccattaatcgtctcttcaacgactaaaaatttgccttctgcgtgcaccacgcaagcaacggtaacgtgcggtttaaacattttgcatccttaatctgtcacttctcgccattcaccattggcaagattatccaaagagtaatcacccatcgcatagcgaatcagtcgcagcgtggggaagccaacatgggcggtcatgcggcgcacctggcgattacgtccttcatataaggtgatcttcagccagctggtgggaatacttttgcgttcacgaattggtggattccgcggccataaccacgcgggttcgtcaaccagctccgcgccggcgggcagggtagggccatcatttaaggttacgccattgcgcaaggcttcaagtgcgtcttgtgtgggaataccttccacctgcacataatagatttttccggtgcgtttacccggctgggttaaacgcgcctgcaacgcgccgttattggtcagcaccagcaacccttcgctatcgcggtcaaggcgacctgctgcataaacaccctgaaccgggatgaattcttttaatgttttgcgtccggcttcatcggtgaactgcggaagaacatcgtagggtttattgaacaggatcacacgcgtgggctggttttcaggtttacgcctggtagaacgttggctgctgaatcgcttaacctggtgatttctaaaagaagttttttgcatggtattttcagagattatgaattgccgcattatagcctaataacgcgcatctttcatgacggcaaacaatagggtagtattgacaagccaattacaaatcattaacaaaaaattgctctaaagcatccgtatcgcaggacgcaaacgcatatgcaacgtggtggcagacgagcaaaccagtagcgctcgaaggagaggtgaatggaaagtaaagtagttgttccggcacaaggcaagaagatcaccctgcaaaacggcaaactcaacgttcctgaaaatccgattatcccttacattgaaggtgatggaatcggtgtagatgtaaccccagccatgctgaaagtggtcgacgctgcagtcgagaaagcctataaaggcgagcgtaaaatctcctggatggaaatttacaccggtgaaaaatccacacaggtttatggtcaggacgtctggctgcctgctgaaactcttgatctgattcgtgaatatcgcgttgccattaaaggtccgctgaccactccggttggtggcggtattcgctctctgaacgttgccctgcgccaggaactggatctctacatctgcctgcgtccggtacgttactatcagggcactccaagcccggttaaacaccctgaactgaccgatatggttatcttccgtgaaaacagcgaagacatttatgcgggtatcgaatggaaagcagactctgccgacgccgagaaagtgattaaattcctgcgtgaagagatgggggtgaagaaaattcgcttcccggaacattgtggtatcggtattaagccgtgtagcgaagaaggcaccaaacgtctggttcgtgcagcgatcgaatacgcaattgctaacgatcgtgactctgtgactctggtgcacaaaggcaacatcatgaagttcaccgaaggagcgtttaaagactggggctaccagctggcgcgtgaagagtttggcggtgaactgatcgacggtggcccgtggctgaaagttaaaaacccgaacactggcaaagagatcgtcattaaagacgtgattgctgatgcattcctgcaacagatcctgctgcgtccggctgaatatgatgttatcgcctgtatgaacctgaacggtgactacatttctgacgccctggcagcgcaggttggcggtatcggtatcgcccctggtgcaaacatcggtgacgaatgcgccctgtttgaagccacccacggtactgcgccgaaatatgccggtcaggacaaagtaaatcctggctctattattctctccgctgagatgatgctgcgccacatgggttggaccgaagcggctgacttaattgttaaaggtatggaaggcgcaatcaacgcgaaaaccgtaacctatgacttcgagcgtctgatggatggcgctaaactgctgaaatgtagtgagtttggtgacgcgatcatcgaaaacatgtaatgccgtagtttgttaaatttattaacgggagcgtaacgctcccgttgttttttgttaggctgctaacggttatcaaaattttatcaaaaaaagttatcaaaacccctcggtagttttggggtaggctggccggtcaggtggtagttctactactagtctcccacatagatattccttagctttttattattgctggcggacgctcgttaatatttaaggtcttcattgattaagacatccccaaagttagttatgtattcactgttattaggacaattatgaattaccactccttacacccgctcaaatattgttaaattgccggttttgtatcaactactcacccgggactcgccaggggacagccaacaggcattgggtgcaatcaccttagcgttcaggtacatgcggaatgtaaaaaaggccgcgagcgcggccccttcacatacatctttagtactgagactgtttaacctagggaattattatcgtattatattgcattacaactcccaacagtgacatatgaacttcctgctttactccacgactttaatatttcaaggccatgtgaagaacatatttcttgcactgcgagttcatcgagtaatccatagtaagaaacactttttgaatttttgtaaatgtatccgtaaagatgttttcttcctgtttcgtattttttgaagtatgagcttttatattgatttacaataagagtctcacctcctgattttagtaatctcttgatgctaagaactatcagataattcaaagcgtggctgtgatgataggaattatgttttttacgtgaatgagaataatcttaaatgaggaataactcattgattgacaatatttttattcaagaagtgtcattgactgttaacgcaatgttgtaaaggtaagataatctgatttatcaatattattgtgtgatttttatgtgagcagaagatattcatcagcaacgattacattagtcattttattttgccgacggcctcattgtcgaaagataagcgtacgacagtattatcagaaaagagtgattttttatccaactacacttcagcgcactgcgtgtaaaaaatgcctctttcttatgcgggatatcatcatttcatcatgatgtctttggtgagcggtgaacacaatgcacctgcgctgtctcttcaggatgaatcccctggtctggtgcctgcgggctgatgttgcagcagagcttaggagtcttagacgctactatcatttatccaatggcatggaaagcaaaagtgtcgatacccgcagtatatatcgtgaactgggtgcaacgctgagttacaacatgcgcctggggaacggtatggaaatgaaccctggctgaaggcggctgtgcgcaaagaatttgtcgatgataaccgggtgaaggtgaataatgacggtaatttcgtcaatgatttgagcggcagacgtggaatataccaggcagctattaaagccagtttcagcagtacgtttagcggacatctcggggtggggtatagccatggtgccggtgtggaatccccgtggaacgcggtggctggtgtgaactggagcttctgaccatcaacgattaaactgcgcttcggcgcagttttcgtttacaggatgttgaaagggaaaattctggggcaaaaaaagcccgccagttacggcgggaaacctcatcctatgggagaacaatgaataatgaaattgcggggttatcatctcccagtatatccatactaacaataaggttatttactcaaccaggcataaacattttgttttgtgcgtgggaacagccttaaggtgtaaagggggaggtggaaatagcaatgaggagtatcagcaagaatactcgccgctttaccacaacgtggatgagagggatgaaaaactcaaggcagagataactctgccttgaagataaatgcgcttttacagcgggcttatttcagctcttctgcttccggtaaggtcacgttcagctcaagaatagaaatatcgccatctttttgctcaagctgtacggttaccatctcaggatcaatttgtacgtatttacaaatgacctcaagaatatctttacgcaactgcggcagataatgcggttctgcatcgctgcgacggcgttcagcaacaataatctgcagccgttcttttgcaatgttggctgtgtttttcttccggctgagaaagaaatcgagtaatgccataacttatcctccgaacaagcgtttgaggaagcctttcttctcttcttcaatgaagcggaaaggacgttcttctcccaacagacgttctacggtatctgcgtaggctttacccgcatcggcgttaatgtcgagaatgaccggttcaccctggttagaggcgcgcaatacactttgatcctctgggatcacgccgacgagtttgatgcgcaggatctccagcacatcttccatgctcagcatgtcacctctgcttacgcggcctgggttatagcgcgttaacagcaggtgctctttaataggctcttcgccattttctgcgcggcgacttttgctcgccagaatgcctaaaatacggtcagagtcgcgtacactggagacttccgggttggtggtaataatggcttcgtctgcaaaatagagtgccattaacgcaccggtttcaatccctgccggggagtcacaaacgataaattcaaaatccatcgctttcagatcatcaagaactttggcgaccccttcacgggtgagggcatctttatcgcgtgtttggcttgccggcagaatatagagattttcagtacgcttatctttaattaacgcctgatttagcgttgcatcgccctgaatgacgttgacgaaatcgtaaacgacccggcgttcacaacccataatcaggtcgagattacgcaggccgatatcaaaatctatcacgacagttttctttcccttctgggccaaaccagtggcgatggccgcgctggaggttgtcttaccaacaccccctttgccgctagtaacaacaataatgcgtgccatagaaattccttgttaaaaagggatcaatttaacggttgaacggtcaaagcgttttcgactaactgcagtcgcgccgctttgccataaaattctgctgggatttgatcactcagccagtattcacctgcgatggacaccagttccgccatcaggttcgtacaaaatatttgcgtttcccggtcaccacttgcccctgccagcgcacgaccgcgcatcatgccatagacatgaatgttcccatcggcaatcaattcggccccagcgctaacgtggcttgtaacaatcagatcacattgtggagcataaatacgctgaccggaacgcaccggggtatctattaaacgcgtttttgtgaccggcgttgtattttgcgctggagcctgcggtgtgggagctggacgtggcgctttttcctttccttccgtcaggataggcagccccatcttttcaatttcggctttaagttgcgcatctttgcagccacttacgccaataacccgcaaaccggttgcgctaaccgccttatgcatcgcactccagtttaccgggtcttccagtgcactgacgttgagtacaacgggggcatgttttaaaaatgcgggggcctgagcgattttgtcttccagcgcctgatggataaccttaggttctgcctcatgcagatgaaccacagataaagtgaagctactgcctttaagctcgattggcgtgttactcatcctggccttactcaattagctattaatcatcgccagcgcgcgatgatgttccgaagactataaggcatgttatagtctggattatattgaggcaagtcaccctcccatttattcagagtaaaagtctattctgtgataaatggcgctgattcatagcttaaaaaatacccttgtcaatcaacccattgccgtcgtacttttgattgttcttatttacgcttcctttttccgcaccctaatcgtgacagcatctccagacctgtttaaatatccagtattgaggcaagtgtattttttcaccacgccaggctttcttaactttccattttttgcggcatcattaaagaacagatacccgttatcttaatatccgccacagaattgctctatcatagaaaccgcagaagacgtctgatacttctgtcaggtcatcgtaactcgtccaggtcagcggttttgattacggattgatgatgaaatgagcataagtgttgtacggttggattatcaggatgtgctatgaatatgatgcgtattttttatatcggattgagtggtgtggggatgatgttcagtagtatggcgtctggaaatgacgctggcggacttcaatctccggcgtgcggcgttgtttgcgacccgtatatttgtgtgaacagtgatggcatttccccagagttaacaaggaaatatctcggcgaaaaagccgctgaaaacttacaaagtttacaaggctacgatcccagcgaatttacattcgctaacggtgtattttgcgatgttaaagaaaaattatgtcgtgatgatcgttattttggtgtggatggtaagcggagtggaaaaatcaatcaaaccaccacaaagatgttatttatgtgtcgtgagtgatgtcttgtttacattatgttctattcgtcattaacctcttgagcgacagagaggagtggggcattaacgtttatgacggggagagtccccgtcggttgacatttacttaatttgaatatcgacgttatattttttagttttgtttttacgggcgtcgtttcgggtttgcaacactcgcagctcatatttgccagaagcagggagactgtattgtccgtgactatcgagttctggggaatatctggataaatcaacactatcatcgattcctggcccgaagaggtaagtatcagcgccttcattagagatactcacatgcactttctgaccttttttggcatagaaggtatatgtatcgtaatcgtatccctttatttcgccggagtactgagcgctgctatggccttttctgaactcaacattgacattcttacccgcagcaaagctcgtggaggttagcagtgcaagcagcaatacagccttcctgatgctcttgattttcattggtagtctcctgttcagaatgagtacgatgaactgttataatataacaatccctaacgggagaattccagtggctttcctgcgttcggtaaaatcacgttgcggcatttttgccggggggattacttataaagggggcatggactcaacaaaccgtagaaatctacagctggctggcttgtggcgcgggtttcattgatgttagcttatgccaaaacctggcatcttaaagagtaaaagtatgttttgtgtgatttatcgaagcagcaagcgtgaccagacctatttatatgtcgaaaaaaaagacgattttagccgtgttcctgaggaactgatgaaaggttttggtcagcctcagttagcgatgattctgccgctggatgggcggaagaaactggtcaatgccgatattgaaaaggttaaacaggcattaaccgagcaaggttactatttgcagttaccgccaccacccgaagatttgctgaagcaacatctttccgtcatggggcagaaaacagacgacactaacaaataaccgatatccggcggtggcattatctttgtcggcgcgggttttcatatccacgataaggtgaggggaacgttatgtatcaacatcacaactggcaaggtgcgctgctggattatccggtgagtaaagtagtctgtgttggcagtaactatgccaaacatattaaagagatgggcagcgcagtgcccgaagagccagtgctgtttattaaaccagaaacggcactgtgcgatctgcggcagccattggcgatcccatccgatttcggtagtgttcatcatgaagtcgaactggcggtgttgattggcgcgacactgcgtcaggctacggaagagcatgtccgcaaagccattgccggttatggcgtggcgctcgatctgacattgcgtgatgttcagggaaaaatgaagaaagccgggcagccgtgggaaaaggctaaagcgtttgataactcttgtccgctttccgggtttattcccgcggcggaatttaccggcgacccgcaaaatacaacgctgagcctgagcgtaaacggcgaacaacgccagcaaggtacgactgcggacatgatccataaaatcgttccgctgatcgcttatatgagcaagttttttaccctcaaggccggtgacgttgtgttgacaggcacgcctgatggcgtcggcccgttgcaaagcggtgatgagctgacagtcactttcgatgggcattctttgacaactcgcgttttgtaatactttttgccgcctgaaagcggcggcaaaacttgcatcgctgtgccagactggttataaggtgcgttttaacgtaatggcggaacacctgatgagcgatgtacctttctggcaaagtaaaaccctggacgaaatgagcgatgcggaatgggagagcttgtgtgatggttgcggtcagtgttgcctgcataaactgatggatgaagacaccgacgaaatctacttcactaacgtcgcctgtcgccagctcaatattaaaacctgtcaatgtcggaactacgaacgtcgtttcgagtttgaacccgactgcattaaattaacccgtgaaaatctgccaacattcgaatggctgccaatgacctgcgcttatcgtttgctggcggaaggtaaagatttacctgcgtggcatccgctacttactggtagcaaagcggcaatgcatggtgaacgtatctctgtgcgtcatatcgcagtgaaagaaagtgaagtgattgactggcaggatcatatcttaaataaacctgactgggcgcagtgataaatttaatagatgctgatgggggctttcttaatatacgtctggatgctcgccatttcgtagccctgtttttgaaagcgctctgtcataatgagagttacccgataccttattatcaacaggtaactctcaatctttaaaaaacgtctgtgtttttaaatgtgataaaccttataccttgagtacatggagagaataatcgcttatcagacttcaggtacctcaaagagtgtctttttaccgtgtcttttctgatactcattacaggtgttaatcatttttttggccgcttcttttagcaaagaaagcattaaatcatcataatcaacgtagaatctggttgtttcagtttccgtttttatctcaccgatggcggctatttcggtggttaatttcaatttggcggcatcgatatctttattcgcttgtttaaccgtgttagacagggtggtaaagaaattctgcacagattttaacttgttcttcaattctggaatcagttttccttcaactacgcccgcagcaatagaataggaaatgattaatccaaatggaccggcgacgacaccggctgcggcaccggcatatgcttccttcctgattttatctacctgactctggaaatagctgcttttttcactaaaatcattggttaactggctatctaacgccagcagtttcccggaagcgttgttgaaactttgactgcttaccagcagggatttttgcgcttcattcagcttcgtgatgccgtcatccagtaccttaatgagaatgtctttctgggcggatgctttcttctcattgtactcatcaaatagcaaaatatacgctgcgagcaattgcgtcgcaacaccacaccattcatacactgtttgggttgcttcaaaatacttatcctggctatccataagtaaggttttaatatcgccgactaaaacggaggctgcctgactatactcctgtttaaagcgacttaactcttttatggtttcatcaaaggtctgccaggggatgacctgatcgagatatttattataaagatctaatgctccatctgcggtttcgattgcgtttttaactacttctaccgttttatctgcaacgatttcagtcataatcattcgcctctttaaatatataaattgtaatgaaactcctgttttacaactattaataaattttacttcatctaattcatagttagccgggcgggatgcgtcaatgtctttatttctattaatatgataaatatcaaacaatgtttaatgtcattatggcgaatgcttctattctattttttagccgggtgatatttttcatttctgctggatgagcgtcgtcgccagaaggccacgtgagcacaagataagagaacgaaaaatcagcagcctatgcagcgacaaatattgatagcctgaatcagtattgatctgctggcaagaacagactactgtatataaaaacagtataacttcaggcagattattatgttgtttatcaagcctgcggatctccgcgaaattgtgacttttccgctatttagcgatcttgttcagtgtggctttcctagtccggcagcagattacgttgaacagcgcatcgatctgaatcaactgttgatccagcatcccagcgcgacttacttcgtcaaagcaagtggtgattctatgattgatggtggaattagtgacggtgatttactgattgtcgatagcgctattaccgccagccatggtgatattgtcatcgctgctgttgacggcgagtttacggtgaaaaaattgcaactacgcccgacggtacagcttattcccatgaacagcgcgtacagccccattaccatcagtagtgaagatacgctggatgtctttggtgtggtgatccacgtcgttaaggcgatgcgctgatgtttgccctctgtgatgtaaacgcgttttatgccagctgtgagacggtgtttcgccctgatttatggggtaaaccggtggttgtgctaagcaataatgacggttgcgttatcgcccgaaacgctgaggcaaaggcgcttggcgttaaaatgggcgatccctggttcaaacaaaaagatctgtttcgtcgctgtggcgtggtttgctttagcagcaattatgagctttacgcagacatgagcaatcgggtgatgagcacgctggaagagctaagcccccgcgtcgagatttacagtattgatgaggcattctgcgatctgacaggtgtgcgtaattgtcgcgatctgactgattttggcagagaaattcgcgcaacggtgctacaacgtacccatcttactgttggtgtggggatcgcccagaccaaaacgctggctaagcttgccaatcatgcggcaaaaaaatggcagcggcagacgggtggggtggtggatttaagtaatctggaacgccagcgtaaattaatgtctgctctccccgtggatgacgtctgggggattggacggcggatcagcaaaaaactggacgcgatggggatcaaaaccgttctcgatttggcggatacagatatccggtttatccgtaaacattttaatgtcgtgctcgaaagaacggtgcgtgaactgcgcggcgaaccctgtttgcaactggaagagtttgcaccgacgaagcaggaaattatctgttcccgcagctttggtgaacgcatcacggattatccgagcatgcggcaggccatttgtagttacgctgcccgggcggcggaaaaacttcgcagcgagcatcaatattgtcggtttatctccacgtttattaagacgagtccatttgcgctcaatgaaccttattacggcaatagcgcgagcgtaaaactgctgacgcccactcaggacagcagggatatcattaacgctgctacgcgatctctggatgccatctggcaagcgggccatcgttaccaaaaagcgggcgtgatgctgggggatttcttcagtcagggagtcgcgcagctcaatttattcgatgacaacgcaccgcgccccgggagtgagcaattgatgacggtaatggatacactgaatgctaaagagggcagaggaacactctattttgccgggcaggggatccagcaacaatggcagatgaagcgagccatgcttagtccacgttatacaacgcgaagttctgatttactgagggtcaaataaatatagcggcaggaaaaaagcgctcccgcaggagcgccgaatggattagcgaccgaacagatcacgttttttcgctttaaacggctgggaaatcaccaccagcactgcgacaatcaggtaagcgataaaaataccgagcagccactgcggcatttccagacctaaaaaatcccactgacgctcggcgcaatcgccagaggcgacaaacacttgcggcacccacttatccagcggcagccattccgggaaacgaaccataaaatcacaggtggcaaacgggctaggatagagctgaagcatggtgtgctcgtaagttaactgcacaccgcggaacgcactatacaaccagataaccatcgctacataacgcagcggagttttcggggcgatcgcgccaatcagcgcagcacccagaacgccgaataacgcgcagcgttcataaatacagagcacgcaaggtttcagtaacatcacatgctggaaccacagcgccgtcagttccagtgccagagcagtaaacgccatcaacagccacgcgccccggccttgactacattggttcaaaaatcgcaacataatcatttccctgcaatatgcatagagtgcgcagtttaaaccaattcattcgctgcgccaccaggaggcagcaaaaataggacgcaattggacaattatcgggcgaaaaggcaaaccgggcatttgtatgcccggtaagttgttatcaaagcgttgctatccagcccatttgcataaaccattcggttacaggggcaagcgtaaactcgacgcagagcaagccgacgagtgtcaggacgagggtgtaaggcagggccatccacaccatgcggccataagagaggcgaatcaatggcgcgagtgcagaggtcagcaggaacaggaacgcagcctgaccgttcggcgtagcgacggagggcagattggtaccggtattaatggcgaccgccagcagctcgtattgcttcaacgtgatagcgccactttccattgccgctttcgcttcgttgatataaatcgtccccacgaagacgttatcgctaatggaactcagcagaccgttgaaaatatagaacaggctcagctgagcatgttcgcttgcctgcaacacaaactgaataattgggctaaacagttgttggtcgataatcaccgcgactacgctgaaaaacaccgtcaacagtgcggtgaatggcagagattcggtgaaggctttaccgatagcatgctcatcggtgacaccggtcaaacttgttgccagaataatgacactcaaaccaatcaagccaacttccgccagatgcaacgccagcgcagtcaccagccagacgccaataatcgcctggacaatcagacggattttatcctgacgggtacgctggtggcggctttgatcgtcaaactgttgcaacacttcgcggactttctccggcagcgtttcaccgtagccaaaccaacgcagcttctctaccagcaggcaggttaacaggccacaaatcagaaccggaacggtcaccgggctcatgcgcaggaagaaatcgccaaaatgccagccagccgctttagcgatgatcaggttctgtggttcgcccaccatggtcattacgccgcctaatgcggtgccgacaccggcatgcatcatcaggctacgcagaaagccacggaactgttccagaaccactttgtaatgcttgtcgatatgactatcgtcttgcaggtcggtgtcttcggtacgggaagaggctacgcggtgataaataccataaaaaccgactgcaacgctgatcaccaccgccacgacggttaaggcatcgaggaacgcggagaggaacgcagccgccacgcaaaaagagaggctcagcagcattttggagcgaatgcttaacagcaaacgggtaaatatgaacagcaacagctgtttcataaaatagatacccgccaccataaacatcagtaacagcaagacttcaagatttgccgccacctcttcacggacgtgttccgcgctggtcatgccgatgaataccgcttcgatagccaacagaccaccggggagcagcgggtagcatttcagggccatcgccagagtgaaaataaattccgctaccagcaaccagcccgcgacgaaagggctgatgaggaaaattaacgggtttacgattaagaaaatgatgagggcgagtttgtaccagtcgggggactggcccaaaaaattgcgccatagcgcgcggccccaggagatctccatgatggtttcccttaccttacaaataatcaatgatgtttttatgtttaaacgcaaagcttaacggtcaggcaggagtgaggcaagtcttgatagtcaaggggaaagagatgcggaaaatgaagccttgatccctttttcttctttttgtctgctatcagcgtagttagccctctggtatgatgagtccaactttgttttgctgtgttatggaaatctcactatggtcattaaggcgcaaagcccggcgggtttcgcggaagagtacattattgaaagtatctggaataaccgcttccctcccgggactattttgcccgcagaacgtgaacttagtgaattaattggcgtaacgcgtactacgttacgtgaagtgttacagcgtctggcacgagatggctggttgaccattcaacatggtaagccgacgaaggtgaataatttctgggaaacttccggtttaaatatccttgaaacactggcgcgactggatcacgaaagtgtgccgcagcttattgataatttgctgagcgtgcgtaccaatatttccactatttttattcgcaccgcgtttcgtcagcatcccgataaagcgcaggaagtgctggctaccgctaatgaagtggccgatcacgccgatgcctttgccgagctggattacaacatattccgcggcctggcgtttgcttccggcaacccgatttacggtctgattcttaacgggatgaaagggctgtatacgcgtattggtcgtcactatttcgccaatccggaagcgcgcagtctggcgctgggcttctaccacaaactgagcgcgttgtgcagtgaaggcgcgcacgatcaggtgtacgaaacagtgcgtcgctatgggcatgagagtggcgagatttggcaccggatgcagaaaaatctgccgggtgatttagccattcaggggcgataatcccttccgtttaaagagcaaacccctcaaacgaggggttttttgttgtttttacagatttcccattcttggcgggcaacgttccagcaactcgatgctgccgtcttcgttttgctgttcgagcatcacatcaaatccccacaggcgatgcacatgcttcaggacttctttgcgcccccgatccagcggtgcgcgattatgtggaatataacgcagcgtcaggctacggtcgccgcgcaaatccacgttccagatctgaatattcggctccagattacttaagttatattggctgcttaaccggttacggatctcccgataaccttcttcattatgaatagcggaaatctccagataattatgccgatcgtcatccagcacggtgaagaagcggaaatcacgcatcactttcggactcaggaactggctgataaaactctcatctttgaaatcacgcatcgcgaaatgcagcgtttccagccagtcggaaccggcgatatccgggaaccagtatttgtcttcttccgttgggctctgacaaatccgtttaatatcctggaacatggcgaacccgagggcatacgggttgatgccgctgtaccacgggctgttataggggggctggaagaccacattggtgtggctgtgcaaaaactccagcataaaacgttccgttactttcccttcatcatacagatggttaaggatggtgtagtgccagaaggtcgcccagccttcgttcatcacctgagtctgtttttgcggataaaaatactggctcaccttacgcacaatacgcaggatttcacgctgccaactttccagcagtggcgcatttttctccataaaatagagcaggttttcttgtggttcggacggatagcggcgcgcttcagcaaccgttttctcttcctcgcgcttcggcagggtacgccagagcatattgacctgactttgcagatactcttcgcgacttttctgccgggctttctcttcttgcaggctgattttttgcgggcgtttgtaccggtccacgccgtagttcatcagcgcgtggcagctgtccagaagccgttctacttcatcaacgccataacgctcttcgcactcggtaatatatttacgggcaaaaatcagataatcgacaatgctactggcgtcggtccagctacggaataagtaattgtttttgaagaaagagttatgcccatagcaggcatgagccatcaccagcgcttgcatggtaatggtgttctcttccatcaggtaagcgatacacgggttagagttaatgacgatttcataggccagtccttgctgaccgtgcttatacagccgttcagtctcgataaactttttaccgaaactccagtgcggatagttaattggcatgccgacgctggagtaggcatccatcatctgttcactggttatcacttcaatctggtgcgggtaggtatccagccggtagagtttcgccacccggtctatctctgccagataaacatccagcaggtcgaacgtccagtcgggtccatcgctcaaacgtgtggtgtccttattcatagaatcgatcgtcgccatacgcgcacctcattgttgtcggcgctctctgtgtggagcacctcatttcaagcatagaacacctgttaaaaaccgcgtcgccggagaatttttttctttgcgatttcttattatcagagtgccactaatccgcttctgaacggaattttatgctggataaaaagggcgttcagcaggagatactaaagacgccatattgccgcagagtcagggagatgtgagccagctcaccataaaaaagccgcatgttgaataatattttcaactgagttatcaagatgtgattagattattattcttttactgtatctaccgttatcggagtggctatgcgagttgtcatactgggaagtggtgtggtaggcgttgccagcgcctggtacttaaatcaggcaggacatgaggtcaccgtcattgatcgggagccgggggccgccctggaaaccagtgccgcgaatgccgggcaaatctcccccggatatgctgcaccgtgggcggcaccaggtgtgcctttaaaagcgattaaatggatgttccagcgccatgcgccgctggcggttcgtctcgacggtacgcagttccagttgaaatggatgtggcaaatgttacgtaactgcgacaccagccactacatggaaaacaaagggcggatggtgcgtctggcggaatacagccgtgattgcctgaaagcattgcgcgccgaaaccaatattcagtatgaagggcgtcagggtgggacgctgcaactgttccgtaccgaacaacagtatgaaaatgcgacccgcgatatcgccgtgctggaagatgccggcgtaccgtatcagctgctggaatccagccgcctggcggaagtggagcccgcgctggcagaagtggcgcacaaactgacgggcggcctgcagttacccaatgatgaaaccggagactgtcagctatttacccagaatctggcgcggatggcggagcaggcgggggttaaattccgctttaatacgcccgttgaccaactgctttgcgacggcgagcaaatctacggcgtgaagtgtggcgatgaagtgattaaggccgatgcgtatgtgatggcgtttggttcttacagcacggcgatgctcaaaggcattgttgatattccggtgtatccgctgaaaggctacagcctgaccattccaattgcgcaggaagatggtgcgccggtatccaccattcttgatgaaacctacaaaatcgccattacccgtttcgataaccgcattcgtgttggcggaatggcggagattgttggttttaataccgagctgttgcaaccgcgtcgtgaaacgctggagatggtggttcgcgatctctatccacgcggcggtcatgtcgagcaggcgactttctggactggtctgcgcccgatgacgccagacggcacgccggttgtcgggcgtacacgctttaaaaatctgtggctgaataccggtcacggcacgctcggctggacgatggcttgcggttccggtcagttgttaagcgatctgctctctggtcgcacgccagcgatcccatatgaggatctaagcgtagcgcgctacagccgtggatttacgccaagtcgtccgggccatttacatggcgcacacagctaaggaaacgagatgacccgtccgatacaggccagcctcgatctgcaggcattaaaacagaatctgtccattgtccgccaggccgcgacgcacgcgcgcgtctggagcgtggtaaaagcgaacgcttacgggcatggtattgagcgtatctggagcgcgatcggggccaccgatggctttgcattgcttaacctggaagaggcaataacgttacgtgagcgcggctggaaaggaccgatcctgatgctggaaggatttttccatgctcaggatctggagatttatgaccagcaccgcctgaccacctgcgtacacagcaactggcagctcaaagcactgcaaaatgcgcggctaaaagcaccgttggatatttatcttaaagtgaacagtgggatgaatcggttgggcttccagcccgatcgcgtgcttaccgtctggcagcagttgcgggcaatggcgaatgttggcgaaatgaccctgatgagccattttgccgaagcggaacatcctgatggaatttccggcgcgatggcgcgtattgagcaggcggcggaggggctggagtgtcggcgtagcttgtccaatagcgcggcgactctgtggcacccggaagcgcattttgactgggttcggcctggcattattttgtatggcgctagcccgtccggtcagtggcgtgatatcgccaataccggattacgtccggtgatgacgctaagcagtgagattattggtgtccagacgctaaaagcgggcgagcgtgtgggctacggcggtcgctatactgcgcgcgatgaacagcgaatcggcattgtcgccgcagggtacgccgacggttatccgcgccacgcgcctaccggtacccctgttttagtggacggcgtgcgcaccatgacggtggggaccgtcagcatggatatgctagcggtcgatttaacgccttgcccgcaggcgggtattggtacgccggttgagctgtggggcaaggagatcaaaattgatgatgtcgccgccgctgccggaacggtgggctatgagttgatgtgcgcgctggcgctacgcgtcccggttgtgacggtgtaacttgttgtaagccggatcggaggcaacgtcttctgggtgcaaaaaaatcatccatccggctggtcagcaactgtagttgttaatgtgacagagccattgcccatgatagtgtccattaaaaggatggacactatttccccggaacctgaactcaccgcacaggcgttctacataaaacgcttacgcttcattgttgactcgaactcgacttcagataaatcacgctttacccttgatggagcctgtacatagatttgtgtaattgcctgattttgatatgttcaattcaacatcaaatgaaggttaaattatggacgacaaacaattgcaggctcaggctgcgttcagcaaagcatcgcaaccggcgatagatgcttcattaaatttaagattcagcttcctcttcagccacccgtacgccaatcttcaacacttcattatcttctttctcggccaccgtccagatcatcccggcaaactctacctggtcaccgacaaccggtgccgcgcctaacaactgctggacaatttcacccagcgtttgctgcttatcacgatattctcgcccgtcttccaggccatatatcagcgcaacatcagcatatttggcgctggcttcgagaatgaagtcaccaaagaagcgttgatccagcgcgaccggcgggctctggctgaacagtttaccgagcgccggaagatcgcgttcccgaccaattacacacaacacatcgccttcgcgcagtcgggtgctgccggtaggatgaagcaactggttatcacgaaacagtgccgcaatacgcgtctcttttggcatatgcaaatcgcgcagtgccgcgcccacgcaccatttatcggcactcaattgataaacaaactgctcccacggattttccggatgaatatccaggccaacgcgactcaccggacgtcccactggcggaaccaccactttggcttttttagccgcccagctgagacttgttccctgcaagagcagactaaccagaaccacaaagaaggcgacattaaagaacagacgtgcattctccagccccgccatcatcgggaacacggccaggatgattggcaccgcgccgcgtaatcctacccagctgataaacacgcgctcacgcagattgaaaccgcggaaggggagcaatccagcaaatacgctaaggggacgggcgaagaatatcatccatgcggacaaaatgagcgccggaatggcaataggcagcagatcgcttgggttaaccaacagccccagcaccaggaacatggcgatttgcgccagccaggcgaggccgtcgaaattttgcaggatgccgtagcggttgcgaatagggcgattacccagcagaaaaccgcacagatacaccgccagaataccgctaccttccagcgcagtagttaaactgaaaatcagaataccgccacttaatgccagcaatggatataatccggcgggcagggcgatgcggttgatcatttgcagtagtaaataaccgccgccaagacctattacaatgcccagaccaaattgttgcagaatatcgacaatgaacatccagctaatattgctctcatgatgctggatcatcgcaattagggtaatcgtcagaaagaccgccattggatcattactgccggattcaatttccagcgtgctgccaacacgttcgttaagccccttaccacccagcagagaaaagaccgctgcagcatcggtagagccgacgatagcgccgattaataagccttcaatcaaatcaagattaaacagccacgccgccatcatgccggttaaaccagaggtgataagcacgcccagcgtcgccaggctcagtgccggtcctaacgccacacgaaaggaactggcctgagtgcgcatcccgccgtcgagcaaaataatcgccagtgccaggttacttaccatgtaggcgaaggggtaattatcaaacgggataccgccgacgccatcgactcctgccagcatgccgatcgccagaaaaataaccagaataggaatgccaagacgggaagaaaaactactaagtaatatactgctggtgacaaggatggatcctaagatgaaaaggctaattattgttgtggcatccaacggtcggttactcctgattacgctgtctcttatataaaccctaccatattagcggcagagacagcgttttacttagccctgaagcgtgatttttttacattttaagaacaggatgaccgctaatcgtcaactgagtgccttcccgggtgttattcagaatggcatgtgcgcccaacggcagcgtaaccgtgcgttgttcatgaccaaaatcgaggccggtaatgagtggaatgctcaggcgggaacgcaaaaacgcgtacacactctccaggttgtaacctgcgtcataatcattgggcgtgctgccgctaaagctaccgagaataatcgccttctgacgtggcaaaattcccgcatgatagagctgcaacagcatacgttcgacccggaaagggtgctcgttaatatcttccagcaccagaataccgttctcaatttttggcatccacggtgtaccgatcagactaatcagcatcgcaagattgcctccccacaacgtgccttcggcccgacatgtcgggccttccccttgccattcaatggtgaaggtttcattgcgtaacgccagccagaaatggtgctcggtaaaggcgttcagttcatccgcgccaaagtttgctaccagcatggggccgctaaaggtgatgacattgccatgcgccagaagaccgcactgaatggcggtaaaatcgctatgtccgcaaatgagcaacgggtcatgttgttggcgagccaccagtgcctgccagtcaatatctgccagtaaacgactggcaccgtaaccgccgcgtacagccagcacgatggtgttgggggtagtcagtctggcaagggaattgagatcttccagacgctctgtttccgtacccgcaaaacgctcacaacgacgggcaataacctcgacgttattgacttgatgccccgcgtcggtaaggcgctggataccacgcagcgcggcgtgctgtttaatgcagtaaccgcttggggcaattaagtgaaacagagacatggcaattccttgctgacaacagaaacgaaatgtatatcatgccgcttaggtgtgccgttgtcacctcaacggcgattccaggctataaggatagaagaagtgaaattgagatggtttgcctttttgattgtgttattagcgggttgtagtagtaagcatgactatacgaacccgccgtggaacgcgaaagttccggtgcaacgtgcgatgcagtggatgccaataagccagaaagccggtgcagcctggggcgtcgatccacaattgatcacggcgattatcgctatcgaaagcggtggtaatccgaacgcggtgagtaaaagcaatgccattggtttgatgcagttaaaagctagtacctccggacgtgatgtttatcgccgtatgggctggagtggtgagccgacgaccagcgagctgaaaaatccagagcgtaatattagtatgggggcggcttacctgaatattctggaaaccggcccgctggcaggcattgaagatccgaaggtactgcaatatgcgctggtggtgagttacgctaacggggcaggtgcgctgctacggactttcagcagtgatcggaaaaaggcgatcagcaaaatcaacgatttggatgctgacgagttcctcgaacacgtagcgcgaaatcaccctgcgccgcaggctccgcgctatatctacaaacttgagcaggcactggacgcgatgtaaatcagtcgcgcactttgtccgctttttcccgggcttctcgctcgagagagaaaataatccgctgtaattgccgctccaccgtcgggctgacgttaagaaaacggaagctcagacggggagtggtgatggtttcattcttgccatcaatcactttgcgctcgctgatggagattaactgggcgtcaaagtgaaaaacaccccattgccccatgttgacttcaatctgagcgaagcgcatgccttcttgtaattcggcaggctttgctgtttccagtaatgcgcccatgccgcctaagctcaaatcatacaggcggaaacgtaacgtactgttatccgccagtttggtctggcaaaaataaggcggatggagtggggcggagatgcggaaatatcggcgtcgttgtacaaaccataaggtgggaggcggtacggtaataaatgccggaagctgcaagtattcactctgctgtagttgttcaacagtaaactcgactttcgcaccctgagtttcggcggtaatggtaatgtgctgtgcctttagcacggcgatgttgtcttcggcttgactgccgaaatccagcaccagtttatccggggttattgccagtaatttgctgatcagctgcccgccattccaactgagacgcaaaggaattgcggctttgtgcaaatcgcgtaacacgcccaggacggctaacggattttgtttcaggaactgctcatggtaatgactcacgcggaaaaactcctgactgacaaactgtctttggtttatcggtcacagttaacaaaacttaatacaaatgcgtgaatattttttacatgttgttcttaaatcagccgacatacgcccagcatcgatcccgcccttgcctatacttagagcgttgatgtaagcatttcttgcgtccgattcatcgaaacgagggcctgaacatgggaattattgcctggattatttttgacctgatagccggcattatcgccaagctaatcatgccggggcgtgatggtggtggatttttcctgacctgtattctcgggatagtcggtgcggtggtcggcggctggctggcgaccatgtttggcattggcggctccatcagtggttttaatctgcacagcttcctggtggcggtggtgggagctattctcgttctgggcatattccgcctcctgcgaagagaataagattttcataaggcggatagcgatacagatgccgctatccgctttcacatcagaacgtatactcgacacctgctttacgggtgaaaaaaatcaatatagcacttcgatatccgataaagtcggttcccggtaacaacaacagaatccttttttaattattgtttcgttgtttttggtgtgattcagaaaataaatattttagacagtagccagagtggcgttaaaaatggggcggatagtgaggcggttttggctgcgcttattgaacatttagaattgatcaatccttctggcagattaagccaaaatacccgtagcgcaatgcttcagttacgcgaagaggaatggtctgaattctttttttggttgctaaattctctggagtgtctggattatgtgattattaatttaactccagaaagcaaaaaaacgttgatgagtgaacaccgtaacaatattcaggtagcaattgatgctttatatagccaacgtcggcgtaaaagcccgggtgatgaaagtgaaacacttacccgtagaaatgacgctatcttcggcaaccacgtatggcaaacatttgcgcaatacttcccgccaggacttgaaaaaccgtctgtgtaaaaaaaaccatagctatggtgttatctgccgacaacgccatccggagaagccgaatgacgttgtcggagtaagcgctggttaaggtgtgggttgtgcctctttggtactgggttgcgtcgttgcactcttaacggtcggacgcgtcgccggaacattgtcacacggttgctctttcgggcagatcaaatccagcattttcagcgtcacgccattggtccagccaaagccatcctgtaatggatattcgccaccgccgccccccgttccggtggtgctgacatcatatttttccaccagctttttctcccggtcataggtgtgctgaacattggtcaggaagtgccagctaatgtccatcgccacctctttttgcccgtagttttgtaatccttctgtcgcgacccactgtaacggtgcccagccatttggcgcatcccattgttgcccacttttcacgctcgtggtgttcaggccgccgggttgcagcagatgtgttttcgtcgccgtcgccattttgttggcgcgatctttcgctgccgcattgacgtacagcgggaacagggcggccgcggttaactgattgcgcactttatgacttttcaggtcgtaatcggcataccagccttgttgatcgttccacaggtatttttcgatccctttttgacgggcatttgccagcgtttcgtactggtttgccatcgcgttatctccggcagctttgctggcgcgggcgaggattttttccattttaaacatcaggctgttcagatcgaccggtacgatgctggtggtgcgtaaggtatttaactgctgcgggttgtccatccagcggctgctgaaatcccagccagacgcagcggcagagcgcaggtcgcggtaaatttcagtggcaggtcgattcggattgcttttggcggtggcaatatcttccacccaactctctggtcgtggcgtatcgcgatcgtcccagtagcggttgagaagggtaccatcctgaagtttgacaacgcgtttttcctgttgtccggcttgcaggttttcaacaccgtccatccagtaagcatattctttttgcatttgcggcaggtattgcttcaacgcggcatcgccttcatgctgcgccagtaactctaccatcagggcaaagaagggcggttggctgcggcttaaatagtaactgcggttgccgttgggaatatgaccgtaagtgtctatttcatgagcaaaattggccaccatatccgcgactttatcccagtgaccgctttcggcaagtcctaacatggtgaagtaactgtcccagtaatatacctcgcgaaagcgtccgcccggcacgacataaggttccggcagcggtaacagagaatcccatttttcggtgttttcggtagaacgcgttaataccggccaaagtccgtcaatatgttcgcgcagactctgcccctctggcggaacatatttctcgccttctttcggcagggtgaaattgacgttaacgaaatggcgcagatcaaatccgctctggttttgctgcatccgataatcagcaaggatcatcagcggatcgctgttcggcacggcatcggcaaaggttttttggtccggaaaaagtttggcgttttgcacatcattaaacagcggccctaataaaatatcaggcggctgtggtgttaccggtgtttcttctgcctgcacgcttagcgcagcgaaacacaaaaagatacaggctggaattaacgccattttttgcgggcgagaaggtgcgggggatttcatcaatcattctcctttggcgaaaccgaataaaacggtattcaagtatcagaaaaccttagttcaggatcgcactagctgcatgatcgaaatctcattctgcgaactgtcaggcattttagaaaagggaattaaagggataaataacggcgaaatagagtgatcaaataacgtctgtttattagccagccagcggcgttgggttcgtgattagcgaagaaaaatcatcataaattggtgaaaaatataacaggtagttaaaaaccattagtgctgagtaaattgccggatgacatcagaacgatgccatccgaacagtggcttaaccctgacggttgaaacgttgcgttttaacgtccagcgttagcgtttcttctggttgtatcgcatacagtttctcaccctgctggcaaatccagccaatccccagttcacgggcgattagggcgctgtgggataccggacttccggcgctaaggcagataccttttacaaccgccggatccagttgcagtactgtggaaggataaatgttctccgccagtagaatagttgggctgttaaactgcgggagttcttctttcgtttgggtcaggtggaccagggtgcgatgcagaagatcgtccacatcaatatagcgagcttgtagatattcatcatccagttgctggtattgctggctaagttctttaagaacttgctgccaggcatattctgccgtgcaatgttcatgctgaaggagttcgcttgccgccgccagcagttccggatcatctaacagtgtatggtgaccagaaaagattgcggcaatatcgtcaagcccgctggcttctgctttcgctgttaacgtcatcagatctaataacgtgaagtcaatagcctggcgtaatcgatcttgttcttcttccacggtcagggtactttttgcctgtaccgtacataaaactggttgataataaaaggctttaccgctaacaggcggaacgggacgcagagtaggtggagcgacttcctccgtttcaccaaagttatcttcagccagctgacggaaagcgatcagtgcctcttcagcttctggccctttcgcaatcaggcgcagcgtatcgttatagcgaacttgtagtaacgcaatctggttaatactctctggtgtgacgcatttgccgtttttttccagcaacatatcggcattaaatgtgcttaaggtataaaccagccgggaggccggacgtacatgcaggccgttacggttttttatgaccaccgccagagaacgggcttcttcatcgtacgcaggacatgtgtcagagatttcagtgtcggaggacggtaaacccagttgttcacgtttggcttccagcgcatgcatggcgtcaaagataactttgtcgatatccgccccgctggccgcgctgaccgttgctgccagtgtaccttcgaccaacggcgcagcacacaaacgtacttttgcggcgatctcgggagccagcaattccagcgcagtttcagcactcaataatgcgctacccatatccatcatgaccagcacatggtcggcatcagcaacagattcgatggcctccatcactttgacggcatcggtaccaatgggattttgtggatcgtcaattcccgcggcaatggcgattttacaactatcactcattaacatctgacgggctaattcaccgacaccttctcccagtcggctgctatgactaactatgaccaggtttaccatcaccaattccttactcttttgcggctaacgccaacatttgcatcataaacatcacgctggtcgcgccgggatcctggtgaccaatactgcgttcaccgagataactggcgcggcctttgcgggcttgcatcgtaatcgtactttgtgcagcggattcggcgatgctactggcagcttcgagcgccaccggaacagagagattttgctcgctggactgacgtaagctttccaccaccggcacccacacatcacacatggttttatcgccaggttcggctttcccgcgactgattacgccgtccgcgccatcgcggaacatctgataaagctcttccagtgtcaggctttgccgtgcctgggtcgcctgtgcggcgcggataaagaaggtaccgaacagcggaccactggcaccaccgacgctggaaagcagcgtcataccggtattcttgagaatgaaaccgatatctttatctgcgatagcagggagtttttccaccactttgctaaagcctcggttcatatttagcccgtggtcagcatcgccaatttcgcgatccagtccggtaagatactcgctctcggtgctgaaaatatcgccacaacgagtgagccagttaacaatttgagttctgctcagactcattgctttctccttatttaccccagttaagggccggggtgtggaccggggcgtcccagagtgccagcgtttcgtcatcaactttcagtaaggtgatactgaaaccggtcatatccagactggtgcagtacgcgccaattaaattacgttcgatagtcaatcccgcttgctggcaacgtgtggtcaggcggttatagacgccgtacagctcagaaagcggagttgcgccaagattgttaaccagcgcaatcacccgatcgccagactggagcggttgtttggtttgttgttcttcctgccaactgccttgttgataatcccagaaacgcaaagtgcgatggtaactgccatttaccagcagggtgtcgaacatttcatcgacggtttgatcaagggaagagaaggggcggcggtcaatacccggctcaccatgaatgccgacgccaaactccatctcattatccgccagggtaaaagaaggtttgcccgcggcaggaacggtacaggcaccgagagcgatacctatactgtggccttgattattcagcttacgccccagttccgcacaggcgtccagactgtcgccacgctccgccgctgcgcctacgagtttttcaattaatacggtgttggcaacgccgcgtcgcccggcagtataaagactgtcttttaccgcaacgtcgtcatcaatgaccacagtggtcacttttacgccgctatcgtgcagtaactcggtcgctgtttcaaagttaagaatatcgccggtgtaatttttgataatcaacagtacaccttcgccgccatcaacttgcatggcgcattcaaagattttatcgggcgtcggactggtgaaaatttcgcccggacaggccccgctaagcatcccctgaccgatataaccacagtgcatcggctcgtgtccgctgccgccaccgctcagcagggcgacttttcctgcaacaggggcatcagctcgggtgacatacaccggatcctgatgcagtgtcaggcttggatgcgctttcgccagtcctgccagttgttcgtccagtacgtcttgcacatcattgatcaattttttcattattttgctccagcaattacggtagggcatggatgatgttcaacgacacggcgaccactgactgccgatgaatccattgtgcatcaggcaagggaaaagaaaattagcccaaattatgtttcatagtgaaacatatgctttaatgaatgttccatattgaaacttttacgtgtattaatacttaaaattgcgagccggaacaccttttgtcataagggatgcgggatatgagtggcgcttttaacaacgatggtcggggcatatctcccttaattgcaacctcctgggagcgatgcaataagctgatgaaacgggagacatggaacgtaccacatcaggcccagggcgtgacatttgcttctatttatcggcgtaagaaagcgatgctgacgctcgggcaggctgcgctggaagatgcctgggaatatatggcaccgcgagagtgtgcgctgtttatcctcgatgaaaccgcctgcattctcagccgtaatggcgatccgcaaaccttgcagcagctaagtgcactgggattcaatgacggcacgtattgcgccgagggaattattggtacttgtgcgctaagcttagcggctatctctggtcaggccgtgaaaacgatggccgatcaacatttcaaacaggtactctggaactgggccttttgtgcaacgccgttgtttgacagcaagggccgattgacgggaacaatagcgctggcgtgtccggttgagcaaactaccgcagctgatttgccgttgacgttggcaatcgcccgcgaggtcggaaatttactgctgacggacagtttgctcgctgaaactaaccgtcatttaaatcaacttaatgccctgttagaaagtatggatgatggcgtgattagctgggacgagcagggtaatttgcaatttattaatgcccaggcggcgcgggtcttgcgccttgacgcgacggcaagtcagggacgggcaatcactgaactcttaacgttacccgccgtattgcaacaagcaataaaacaggcacatccgctcaaacacgtagaagcaacctttgaaagccagcaccagtttattgatgcggtgataacccttaaaccgataatagaaacgcagggaaccagctttattttgttgctccatcctgtggaacagatgcggcagttgatgaccagtcaattaggaaaagtcagccataccttcgctcatatgccacaggacgatccgcaaacccgccgcttgattcattttggtcgccaggcggcgcgcagtagctttcctgtcctgctttgtggagaagagggcgtgggcaaggcactgctaagtcaggcaattcataatgaaagcgagcgtgctgcaggtccttatatcgccgtcaattgtgagttatatggtgatgctgcgctggcggaagaatttattggtggcgatcgcacggacaatgaaaatggccgtctgagtcggctggaactggcacacggcggcacgctgtttcttgaaaagattgaatatctggcggtggagttacagtctgctttgcttcaggttatcaagcagggggttatcacgcgactggatgcgcggcgtttaataccaattgatgtcaaagtgattgcaacaacgaccgcggacctcgcaatgctggtggaacaaaatcgttttagtcgccagctgtattacgcgctgcatgcatttgaaattaccatcccgcctctgcgtatgcggcgtggcagcattccggcgctggtgaataacaaattacgcagtcttgaaaaacgcttctctacgcggctgaaaattgatgacgatgccctcgctcgcctggtttcttgtgcatggccaggcaacgattttgaactttacagcgtcatcgagaatcttgctctgagtagtgataacgggcgcattcgcgtcagtgatttgccggaacatctgtttaccgagcaggcgacagatgatgtcagcgccacccgcctttccaccagtctgagttttgcggaagttgaaaaagaggcaattattaacgcagcccaggtcacaggcggtcgcattcaggaaatgagcgctttacttgggatcggccgcactacgctgtggcggaaaatgaagcaacatggcattgatgcagggcagtttaagcgccgggtatgaaagacagaaacgatttctgatacatcagagtgatctgtatttcattccggcgcacgctaacaattttcagcatcgtttaagggcttgtctatcccgcacttaaaagctgaagcgatatcctccgttgacttgcttctgatcaaagaggttaccctgcgtgtaatccgcttcgagatagaatgtgtgctgtttgttatactgtgcactgactcccacgccgttattccagccattacctttgaaactgtacttctcccgggagttgttcaacagatattcggtatccccactaaactcgcggatagcgccagtcttcacatagacattcagctggctgttgcctgcggtgatgtcataccccagtatcatgctggcacgccccagcaggctttcgtagtgattcagatgtatattgaggccattactcgccttcatagtcatctcattctggtggctgtatgtaagctgggtttgcggctctatatagaacccataaccagtaggggacaggttgaacctctgcccggcttccagggagatgctcattccattcgcagtgccgttggcgttaacgccgttgttctgactgtccagtacgtggaaactatttttctggcggcttgcttttataacgagatcgctgtaaaaaccgttttgtgccatgtaactggcgtacattcccatgtagtcactacgtgcggtaccgtcgcctccgctatagtccgggcttgcatgtgtactgccaatatacagaccgacatacaacggcattacatcagagagacgtttatccccaccaaactggataccgctgtaacccatgtcaaagccgctcagtttgccactggcaaaggagtccaggcttcccccataactgcgcaaccagatattaccgtctttactctgatttcgcaggtcacccatccgttgcatcagcgtacggttttcaacatagttcaataagtaaccgacattgagataattgccgccagcatctgcggtcgtggtgggtttaggcgtgggagcgggttcaggcgtaggatcggggttgactatgggaggctgagcgggagctggtgtgggttcaggattaggagtcggttccggaactgtcccggaagcgtaaagctcccagttagtgccatttttacgcacatcgtacagatatccccccaactcaacctgagaagacgcgctgaagctggccgcgccgtcagtggtttttaccactgtcagaacttcatttcccgttgtggcctcgctgccctggttgcggatagccaatacgtgattaccagcactactcccgctgatattcaataaatcccctttattattaacgccattaccctcgccaacaacatcagcacgcataataaaggtactgttaccgctcaggttctctacgtttaatgtggcaaatgtgccggcagtactcccgtggctggcaaaatcgacagtactatggctcagcgccagcgtgtcgagattagaattacttgttacgttccagacgctgttattcattgcaacgtccagttttccgccattgacattatcgctgagggaggaacctgtccaaacgttcccagggtgcatatccagattgattagcccacctttggaaagaacgctaccgttgataagcatacgaccgctggcgttgatgcggctggcggcataaccatcgtcatgttgcgttgcgatggccatctggtcgggtgtactcatatcaatgaccagatcgctcgtgaggtcgatctggctgttggtcatggcataaattcccctggctcctgccgcgccggtgatagccaaactgtctccggttattctaccgccgctgagagcccacaaacccagcgccagactgccattacgatcaactgtaatatcggtattttgcatgttgacaacagccgttgccgtctgggcgctggcaccataagaaccgccggaaaagatgctgtttcgttgcgctgccgtgccagtaaaattgattatcgcgtcactaccactggtgacgaggccaccgccctgcgcggaagaaatatggctatctgcaccgatagtggttgtaccaccacgaacttcgacgccattggccgcggctccagttacatcaacagtgagtgcattcgcgctaacctggccaaagctccagaggccgtgagcattatcgccattggttttaatggtactgtttgttccgagatcgacaacagagtttttctgtacgtttatccccatggcgctgtagccctgaacatcgattgtcaggtctgtagccgtaaaacgcgcagcaccattggcgttattgccgttgagaccaccgatataaacacctgtacttccatcggtcgtgattttacttccgcttccaagatcgacactggtgccatagtcattgatggttaggcctataccgttgctgttttcaatggtgaattgagtggctgttagtgtactgctatgcccaataatgatgccgtcatcgttactcttaatggtgctgcctgtgcctaagtcagcatgggtatagtcaccaattaagttaatgccgatggcagaggtttgaccaacaacatctactgtgagtcggttagctgtcagggagctgtttttgccctgaataatgattccttttgcatatccagaggcgtcgttgacattgacggtgacatcattacccaggttgatattgccaggcgtgtttcctgctggggtcattacaccatagaggtttccacttggatcggcggtatctcctgtaattctgtcaccatcattaatagtaatattggtgccatattgacttcctgtatcagcagctatcagcaggggggaaaagataattgcattcaaaccaatagcgccaaattttatcagttgaatactggggctacggatttttaattcagcgagacgatctgctttggtattcccattgtgttgtttgatgcccataccactcctatatagtacccagactatgggtctatggattttgtcattttgtttaaatcaatgaataatatcctcttatcatcatgatatttgtatggtgcaatcatgatgagcttctcagagaataattctctattaccgggcaaaatcaggaacacaggaattaatatatatttaacatcccccttacaaaggtgagtttatatcgagttattccctaagttgtcgttacttattccaattcgttactataaatatggcaaaaatattacaacaaacagcggttaaaaaatttggtgaagattttttgtaataatcctaattagttatgggaatttcgcttgatgtatctgcataacaaaaacaatatgcgccatttttgcattactaataagaaaaagcaaaaaacatcgatattcatttttggtcaatgggttttctggcctatcgttgttattgtgctactggttatcattttcatcttgccagcatattggagcgtgatcaattttgatcagctgtgaagggggctgatgtgtagtgatacaaaaacttacgttatatcactgctaatgagatatccggcatctgaacacttatgtctttaattattctcgtggttcactataggcaataagcacaaaagtgtaggatgttacaagaatgattaggactcggtgaaatgaaaaatccacgcaattgcgtggattttatatacttttgcgctcttcatgagatttagcgaaacctcatgagacaataaattaattagacgttgaaaaggaagttcatcacatcgccatctttcacgatgtaatctttaccttctgcacgcattttgcctgcttctttcgcgccttgttcacctttgtaagtgatgaaatcttcaaagctgatggtttgtgcacggataaagcctttttcaaaatcagtatggattttgcccgctgcctgcggcgcggttgctccaaccggaatggtccatgcacgcacttctttcaccccagcggtgaagtaagtttgcaggttcagcagtttataaccggcacggatcacacggttcaggcccggctcttccagcccaagctcctgcataaactcgtcacgttcttcgtcgtccagttcggcaatgtctgcttcaacagcagcacaaaccggaaccacaacagaaccttctttcgccgcgatttcacgcacctggtcaagatatgggttgttttcaaaaccgtcttcgttgacgttggcgatgtacattgttggtttcagcgtcaggaagctcaggtaacgaatagccgctttctcttcagcgcttaaatccagcgcgcgcagcatacctgcattttccaactggggcaggcatttttccaggaccgccagctcagctttcgcgtctttatcgccacctttggctttcttctgtacgcgatgaatcgcacgttcgcaggtgtcgaggtctgccagcgccagttcggtgttgataacttcaatatcgtcagccgggttaactttgccggaaacgtgaatgatgttgtcattttcaaagcagcgaacaacgtgaccgatcgcttcggtttcacggatgttggtcaggaactggttacccagaccttcgcctttgcttgcgccttttaccagaccggcgatatcgacaaattccatggtcgtgggaagcgtacgctgcggttttacgatttcagccagttgatccaggcgaggatcaggcattggtacgacgcctgtgttcggctcaatggtgcagaatggaaagttggccgcttcaataccggctttggtcagcgcgttgaacagggtagatttcccgacgttgggcaaaccgacgataccgcatttgaatcccatgatttaaatcaccttaatatcttaataatcaacctgttattgctaacagattgcagaaatggaaataactttgcctattatacacggcactcggcaaaaatgccgcagacaacgacttattgcgctttaaaggcgtgcaatcggttcgttgctttggtcaagccatctgtaaaccacatttcagtacaacgcgccgcttcgtcaatggcttcatcaattaacttctgttcactaacaggcggtttgcctaacacaaaaccgacaactttatttttatcgcccggatgaccgattccgatgcgtaaacggtgaaagttagggttattacccaatttactgatgatgtctttcagtccattgtgaccaccatggccaccgcccaatttaaatttggcgacgccaggaggcagatccagttcgtcgtgggccaccagaatttcgtccggattaatgcggaaaaaactggccatcgccgcaacggctttgccgctgagattcataaatgtagtcgggactaacaggcggacatcttcgcctccaagagtgactcggctagtataaccaaagaatttagcctcttcgcgcagcggagcgcgcaaacgctctgccagtaagtcaacgaaccaggtaccagcattatgtcgcgttgcggcgtattcagcaccggggttcgccaggccgacaatcaatttaatcgtcacgtttttttgtcctgagtgtgtacataactggcgcgtagtttactggttgcggccccgcttgacaaaaaactgcgtatcaaatgcagataacgtaataattgcctgagtggactattagaaagtcaaggtgttcaggcgtttatttgtaaagttttgttgaaataagggttgtaattgtgatcacgcccgcacataacccactgggtgttgtctatactttacacataaggaagaggggtattccctgttacaacccagaaagttccggaggtgacatatgaaacgcaaaaacgctagcttactcggtaacgtgctcatggggttgggtctggtggtaatggtggtcggcgtggggtatagtatcctcaaccagttaccacagtttaatatgccccagtatttcgcacatggtgcagtgctaagtattttcgtcggtgccattctctggctggcgggtgcccgtgttggcgggcatgaacaggtgtgcgaccgttactggtgggttcgccactatgacaaacgttgccgccgtagcgataatcgccgtcatagctaacaaataatgcagtttgctgaccagtcagtttgcgctgactggtcaatctcgtacttataaatccgccatcgccgcgcgacgattcgggaagaacgccaggcgtcccgggatcggttgaatgccagcgcgagccatagtgcgcagtggctggaattccacgttgcacacgcgcagttcacatccctcgggcagacgcttcacaaaacgctggaacgcatcaagaccaccagcatcaagtaccggaacggcatcccacttcagaatcacaatccgtttgccttcaagacgactctccaggtccgtgaataagccttcagcagcagcaaaaaacagcgggccaataacgcgcagaaccaggacatcgtctggaacatctacgactaccggtgccaggcgagtcatacgtgcgatacgacgcataaacagcaggcttgccagcacgatccccacgctgatggcaataaccatatcaaacaacacggtcaggctcatgcacagcagcatgacgatgatgtcatctttcggcgcatgacgcagcaagtcgaccactttgtgcgcttcactcatgttccacgccaccatcaacagcagggctgccatggcggaaagcggcagccaggagagcagcggtgccagtaccagcagggcaagaataaccagaatagagtggatcaccgcgctgataggggacgttgccccggcacggacgttagcggcagaacgcgcgatggcagctgtagcggtaataccaccaaagaacggagcgataatattccccagtccctgtccaaccagttcgctgttcgccttgtgtttcgtcccggtcataccatccagcaccacggcgcagagcagagattcgattgcgccgagcattgccatactgaatgccgcaggcagcagtgtgcgaatagaatcccaggttagcgtgaattcactattaggcagatcccacggcagcaccagttgcggcagcagttgcggaataccgttaccctgagaaccatcggccaggacgtagtggaattggctaccgatggtagcaacatgtccgccgagcaggttaacaatccccatcaccgcgcaaccagccagcaaggccggaaggtgaccgggtaaacgaatgcccagacgcggccaaaaaacaagaatacctagcgtcacaatgccaatggcagcatcacccacattaatggtcggcagcgccataaataatgcgccgactttttgtagataatgttccgggacatgggccatttgcagaccgagaaaatctttaatctgcatggtaccgatggtgatcccgataccgctggtgaaacctaaggtgacggaaaccggaatatactcaatcaggcgaccaaagcgtgccagacccatcagaatcaaaaagatcccgctcagcaaggtcgcaaccagcagtcctgccagtccaaactgttggctcacgggatagagaattaccacaaatgccgcagtcggaccggaaacgctaaagcgactcccacccgtcagagcaatgacaatccccgcaacagctgcggtatataaaccgtactggggtgccacaccactaccaatagccaacgccatcgccagcgggatagcaataatcccgacggttatcccggcaatcaggtcacgggtaaaccgtgcggcagtatatttttctttccagcaagcgtcgatcagagcgcggaaaggcatcacatgactggaaaatattttgttcacaataatgtttcatccgtgagcgcatcatctgtcaactaaatggcaggtgaaggaggcataggtcatacaaatggatattacagacaaaaaaacccgccgcagcgggtctttgagccgggttcgattagtgttcgaacatggcagagatgctttcttcgttgctgatacgacgaatcgcttcggccagcataccactcagggtcagagtacgcacgttcggcagacttttgatttcatcgctcagcggaatggtatcgcagacaacgacttcatcaattacagagttacgcaggttgttcgccgcgttgccagagaagatcgggtgagtcgcgtacgcaaatacacgtttagcaccacgttctttcagagcttcagcagctttacacagcgtaccgccagtgtcgatcatatcatcgaccagtacgcagtcacgacctgcaacgtcaccgatgatatgcatcacctgactaacgttcgcacgcggacgacgtttgtcgatgattgccatatcggtatcgttcagcagcttagcgatagcgcgggcacgcacaacgccgccgatgtccggagaaaccacaattgggttatccagattcagctgcagcatgtcttccagcaggatcgggctaccaaatacgttatcaaccggaacgtcgaagaaaccctgaatctgttcagcgtgcagatccactgtcagcacacggtcaacaccgacgctggagaggaagtctgcaaccactttcgcagtgattggtacacgagcggaacggacgcgacggtcctggcgcgcatagccaaagtaggggataacagcggtgatacgacctgcggaagcacgacgcagggcatcaaccataacgactaattccatcaggttgtcgttagtaggggcacaagtggactggatgatgaaaatatcaccaccgcgtacattttcattaatttgtacgctgacttcgccatcgctaaagcgacctacagcggcgtcgccgagactagtgtacaggcggttggcaatacgttgtgctagttccggggtggcgttaccagcaaaaagcttcatatcaggcacgagaagaacctcaggcatgcgtccattggtggaaagaatctgccgaaaactgtgcgggccaggcatgatcctttccaggcggtgtattaaagagcgcgatgcaacgtctggaacaaggtgacgttgtcaccgaaactcagcttgcccggcttaaagcatggctctgtgcaatggggaaagattagcgcctttcgccacaaagccattgagccattccggggcttgctctagcacctggcgggcttcagactctgtatcaaattcagcaaagacacaggcccctgtcccagtcaggcggctcggggcgtattctaacagccaggaaagcaccgcatcaacctcgcgaaaacgttttcttgcgataacctcgcaatcattgctgaattcacattttagcaacgtttctatactcctttttggcgtattgcgcgggagttcaggatctttaaaaatcaccggagtcggaatacttacaccagggtgcgccaccagataccacttctctggcggatccaccggcgttagtatttcaccaacgccttcggcaaacgcggcatgcccccgaacaaagacaggaacatctgcgcccagcgtcagccccatttccgccagctcatccatgcttagcccgcattgccagagatgatttaatgccaccaggaccgtcgcggcattggaactaccaccgccgagaccgccgcccatcggcaaacgcttgtcaatgctgatattcgcaccgcttcccgtcggaagacgcccgctgtctgccgcagttttcatcaacaatcgcgctgcgcgaacgatcaggttatcttcatgttccacgccttcaacgggcgttaacagacgaatatccccatcgtcacgaagctcaatgctgatggtgtcgccgtaatcaagaaactgaaacagcgtttgcagcgtgtggtaaccatccgcacgctgaccggtaatgtataaaaacagattaagttttgccggagagggccactgtgtccgcattatttcactatccagttatccatttttaacttgatgcgttgaccaccgtcggtgagttccatattggctggcatcgcaggttgcgttttggtgtcataaccaccataaacaaccttccagtttttgccattctggctgtaggtaatttcgctcaggcggtactggtcgtccagtttgtagtcggttgcatcacccggtaaacctaaaatccactggcgcaagctgttgagcggaattggcattccggtcaatttgccaatcatctcttcggcgtcatcggcggtataacgctgacctttattgtcgactaactgcacgttacccggttgagcattcagctccagttccgtgctgcccaatgggttagtgagcagcagacggtagcgatcctggccggtttgctgccagaaaaagcgggcgtacactttttgttggtcagaaatataagcgaacgcgccgcgagtctgatactgattaagattgcgcacgtcttgctgatgctgacgccattgtgggctatccgggcttttgccaggacctttgggcgtggtaacggaacaggcagtgagcacaagagcagccagcggtagcaggcggataagacgaaaatcgggcaggggcatagtgatgacaagtccttgagatacgttgcagttataacccttaatgctagcgttaccgtccgctatcgtctatgttcaagttgtcttaattgccagaatctaacggctttcggcaattactccaaaagggggcgctctcttttattgatcttacgcatcctgtatgatgcaagcagactaaccctatcaacgttggtattatttcccgcagacatgacccttttagcactcggtatcaaccataaaacggcacctgtaagcctgcgagaacgtgtaagctttagcccggataagctcgatcaggcgcttgacagcctgcttgcgcagccgatggtgcagggcggcgtggtgctgagcacgtgcaaccgcacggaactttatcttagcgttgaagagcaggacaacctgcaagaggcgttaatccgctggctttgcgattatcacaatcttaatgaagaagatctgcgtaaaagcctctactggcatcaggataacgacgcggttagccatttaatgcgtgttgccagcggcctggatagtctggttctgggggagccgcagatcctcggtcaggttaaaaaagcgtttgccgatagccaaaaaggtcatatgaaggccagcgaactggaacgcatgttccagaaatctttctctgtcgcgaaacgcgttcgcactgaaacagatatcggtgccagcgctgtgtctgtcgcttttgcggcttgtacgctggcgcggcagatctttgaaagcctctctacggtcacagtgttgctggtaggcgcgggcgaaactatcgagctggtggcgcgtcatctgcgcgaacacaaagtacagaagatgattatcgccaaccgcactcgcgaacgtgcccaaattctggcagatgaagtcggcgcggaagtgattgccctgagtgatatcgacgaacgtctgcgcgaagccgatatcatcatcagttccaccgccagcccgttaccgattatcgggaaaggcatggtggagcgcgcattaaaaagccgtcgcaaccaaccaatgctgttggtggatattgccgttccgcgcgatgttgagccggaagttggcaaactggcgaatgcttatctttatagcgttgatgatctgcaaagcatcattagccacaacctggcgcagcgtaaagccgcagcggttgaggcggaaactattgtcgctcaggaaaccagcgaatttatggcgtggctgcgagcacaaagcgccagcgaaaccattcgcgagtatcgcagccaggcagagcaagttcgcgatgagttaaccgccaaagcgttagcggcccttgagcagggcggcgacgcgcaagccattatgcaggatctggcatggaaactgactaaccgcttgatccatgcgccaacgaaaagtcttcaacaggccgcccgtgacggggataacgaacgcctgaatattctgcgcgacagcctcgggctggagtaacagtacatcattttctttttttacagggtggaggaggaataatggaatatcaacactggttacgtgaagcaataagccaacttcaggcgagcgaaagcccgcggcgtgatgctgaaatcctgctggagcatgttaccggcagagggcgtacttttattctcgcctttggtgaaacgcagctgactgacgaacaatgtcagcaacttgatgcgctactgacacgtcgtcgcgatggtgaacccattgctcatttaaccggggtgcgagaattctggagcttgccgttatttgttagcccagcgaccttaattccgcgcccggatacggagtgtctggtggagcaggcactggcgcggttgcctgaacaaccttgccgtattctcgatctcgggacgggtaccggggcgattgcgcttgcgctggctagcgagcgcccggactgcgaaattatcgctgtagatcgtatgcctgatgctgtctccctggcacaacgtaatgcccagcatctggcgatcaaaaatatccacattctgcaaagcgactggtttagcgcgctagccgggcagcagtttgcgatgattgtcagcaatccgccgtatattgacgagcaggaccctcatcttcaacaaggcgatgtccgctttgagccgctcactgcgctggttgcggcagacagtggaatggcagacatcgtgcatatcatcgaacagagccgtaacgcgctggtatccggcggctttctgcttctggaacatggctggcagcagggcgaagcggtgcgacaagcatttatcctcgcggggtatcatgacgtcgaaacctgccgtgactatggtgataacgagcgcgtaacgctcggccgctattatcaatgacaagtttttctacactgcttagtgctcatcttattagtatcgcgctttctgttgggctattaaccttacgtttctggctacgttatcagaagcatccacaggcatttgctcgctggacgcgcattgtgccgccggttgtcgatacgctgttactgttaagcggcattgcgttgatggctaaagcgcacatcctgccattttccgggcaggcacagtggctgactgaaaagctgtttggagttatcatttatatcgttttgggttttattgcactcgattatcgtcgtatgcacagtcagcaggcgcgcattattgccttcccgctggcgttggtggtgctgtacatcatcattaaactcgccaccacaaaagtaccgttactggggtaagtcatgagaagcttagctgatttcgaatttaataaagcgccattgtgcgaaggcatgatcctggcttgcgaagcaatccgccgcgattttcccagccaagatgtttacgacgaactggagcgtctcgttagtctggcgaaggaagaaatcagccagcttctgcctttagaagagcagttggaaaaactgatcgcgctgttttacggcgactggggatttaaagccagtcgcggtgtttatcgtctttccgatgcattatggctggaccaggtgttaaagaatcgacagggcagtgcggtaagtttaggtgcggttttattatgggtcgcgaatcgtctcgatttgccgctgctgccggtgattttccctacgcagctgatattgcgcattgaatgtccggatggcgaaatttggctgattaatccttttaacggtgaaagcttaagcgaacatatgctggacgtatggttaaagggaaatatcagcccgagcgcggaactgttttatgaagaccttgatgaagctgataacattgaggtaatccgcaaattgctggatacactcaaagccagcttgatggaagaaaatcagatggagctggcgttacgcaccagcgaagctttattacaattcaaccctgaagatccctatgaaattcgcgatcgcgggttgatttatgcgcaactggattgcgaacacgttgcgttgaacgatttaagttatttcgttgaacagtgtccggaagacccgatcagcgaaatgatccgtgcgcaaataaataacatcgcgcataaacatattgtgctgcattaattaatcgacattttactcaagattaaggcgatcctatgaaacaaaaagtggttagcattggcgacatcaacgtagcaaatgacctgccgttcgtactgtttggcggtatgaacgtgttggaatctcgcgatctggcgatgcgcatttgcgagcactacgtaactgtgacccagaaactgggtatcccttacgtgttcaaagcctcttttgacaaagccaaccgctcctccatccactcttatcgtggaccgggcctggaagaagggatgaaaatcttccaggagttgaagcagacttttggcgtgaaaattatcaccgacgttcacgaaccaagtcaggcacagcccgttgctgatgtcgtggatgtgattcagttgccggcgtttcttgctcgccagactgacctggttgaagccatggcgaaaaccggtgcggtaattaacgtcaagaaaccacagtttgtcagcccgggacagatgggtaatatcgttgataaattcaaagaaggcggcaacgaaaaagtgattctttgcgatcgcggtgctaacttcggctatgacaacctggttgtcgatatgctgggcttcagcattatgaagaaagtgtctggtaacagcccggtgattttcgacgtgacccacgcactgcaatgccgcgatccgtttggcgcagcttccggtggtcgtcgtgctcaggtggctgagctggcacgagccggtatggcggtaggtctggcggggctgtttattgaagcgcatccggatccggaacatgcgaaatgtgatggtccatccgcgctgccgctggctaaactggaaccgttcctcaagcagatgaaagcgattgatgatctggtgaaaggtttcgaagaactggataccagcaagtaatcttttttgcttgaaaaataaagtattagcgttctgcgttaagacttttttcatgggtgccggatacaaaaaaggccgcaggctgttacccctgcggccggtttcgggcgcatattgccatcacggcagcctgacgcccgttttcaccttacttccggttacgccaccagctgacaatcgctgcggtaataattcccgccaggatcggtgctgccaggtcgtgccagaaaatcatggcaaactgcgcgagcgtcatatagccgccttgttgtaatgacaacattttgcggctattcttgaattgttctggttcaagattagcccccgttctgttgtcaggttgtacctctcaacgtgcgggggttttctctttccagcaaccaatgccaccagggataaagcccccgcaacattgcgcctcaccggataacgccggcttggtgtggatactacgactcaattcatcttcacttcatccctgaaatgtttgcaatgaagagtgcattccggtttttcaacagctgttacagtcatttcatgagtgctctggatgaggcttccagctcgggttgccaatatttacttgtggaagtgataaagacaaaaatggccgcaggctgttacccctgcggccggtttcgggcgcatattgccatcacggcagcctgacgcccgttttcaccttacttccggttacgccaccagccgacaatcgctgcggtaataattcccgccaggatcggtgccgccaggtcgtgccagaaagtcatggcaaactgcgcgagcgtcatatagccgccttgttgtaatgacaacattttgcggctattcttgaagtgtctggtttcaagattagcccccgttctgttgtcaggttttacctctcaacgtgcgggggttttctctttccagcaaccaatgccaccagggataaagcccccgcaacattgcgcctcaccggataattccggcttggtgtggatactacgtctcaattcatcttcacttcatccctgaaatgtttgcaataaagagtacattccggcttttcaacagctgttgcagtcgtttcatgagtgctctggatgatgcttccagctcgggttgccaatatttacttgtggaagagataaagacaaaaatggccgcaggctgttacccctgcggccggtttcgggcgcatattgccatcacggcagcctgacgcccgttttcaccttacttccggttacgccaccagctgacaatcgctgcggtaataattcccgccaggatcggtgctgccaggtcgtgccagaaaatcatggcaaactgcgcgagcgtcatatagccgccttgttgtaatgacaacattttgcggctattcttgaagtgtctggtttcaagattagcccccgttttgttgtcaggttttacctctcaacgtgcgggggttttctctttccagcaaccaatgccaccagggataaagccccgcaacattgcgcctcaccggataacgccggcttggtgtggatactacgtcgcaattcatcttcacttcatccctgaaatgtttgcaatgaagagtacattccggcttttcaacagctgttgcagtggtttcgtgcagggtgtggtacaggctcgcaattctgattaacgacctgtccaggtagtatgaagaaatacaataagcaggaatttatattatctcccccgattaccgtcatcggaggagatataactgtcaggcaaatatcgtcatcaaataggcggcaaacagtgccagatgcgctgcgccattgagcatgttagtacgtccggtggagaaggagatatggcacagcactaaagaggccaccatcaccaccatttctggcgcaccaagtgcaaactgcaattcgttacccgtcataaaggcaattagcgtgacgacaggtacggtaaggctaatggttgctaacacactaccaaagaacagattcatcgcgcgctgaacctggttgttcaacactgcttttaatgcacctaaaccttccgggctcagaatcaacagtgccaccaggaagccagtaaaggcgacaggggcattcatgctgtcgagcaatgtctccaggctgctggcgttcattttggtcaccgcaataacggcaatcagatggataatcaaccagatagcatgccacaggctgctatgggcagacggtttaccgtgatgcgggtcgtcatcatcactgtcatcttcgtgctcgtagacaaacaaactttgatgcgttttggtctggatcagcaaaaatacgccatacattgccgcagaaattaatgctaccagtaacgcctgaccggtactaaaattcgccgcaggcagagccattggaaataccagtacgattatcgccagggggaacagcgcaattaaatactgcttgataccaaacagattcatatattgggtggcaaacttacgaccgcccaacaataaactaaagccaaccagcccaccggtaacaatcataatgatactatagagcgtatcacgcattagcgttggcgcggcgtcgccggttgccattaaagcactaatcaaactgacttcaagaataaccacactaaggctaagaataaggctaccgtaaggttctcccaggcgatgggctaatacgtccgcatgacggacaacactaaaggcgctacttaaaataccaataagcgcaagaagattgatggcaatgaccactggtagtgtctggctgcttccccacaggaacagcactaccagcgccagaaccgggaaaataaggctagtctccttgtggcgggtttttaccgcctcttgagcattactcattatggttatccctttgcagatgaatttatcgaaaatgtaaaaaataggtaggaaaaataacagaaagtgtctggatatcggtaacattttacgaatttttaccccgctgtcgattttttactcattggggcataaaaataagtattacgtttagacaatgtttgttttagcgtctcttaagaagagtctgacctgaaaattcttatgttttggcaagagtagatattgttgaccacacttaatgttcaactttgtaaaaggagtcaacgatgccgtataaaacgaaaagcgatctgccggaaagcgtaaagcacgttctaccgtctcatgcccaggatatctataaagaagcgttcaacagcgcatgggatcaatataaagataaagaagatcggcgtgatgacgccagtcgcgaagaaaccgcgcataaagtggcctgggctgctgtgaagcatgaatatgccaaaggggatgatgataaatggcataaaaaaagctaaaaccggtcgcttagttaaagctattcgtgcggtgttgccttgcaagtggtccgtggattgcatattgtcccgttagtggtttcaaaatgagcagtaaaaatgtccggaagacaccaaaaagttgtcgcagggaagtatgcagtggcggaagtgtaaggtgataacgcgtgatttcttgatgaatgccgattgtaaaacggcatttggtgccattgaagaaagtctcttatggagtgcagaacaacgggcggctagcctggcggcgacgctggcttgtcgacctgatgagggaccggtgtggatcttcggctatggaagcttgatgtggaatccggcactggagtttaccgaaagctgcaccggtacactggttggatggcatcgcgcattttgcctgcgcctgaccgccgggcgcgggactgcgcaccagccgggacggatgcttgcactgaaagagggcggacgcaccacaggcgtcgcctatcgactgccagaagagacgctggagcaggaactaaccctgttgtggaagcgagagatgattaccggctgttatctgccaacctggtgtcagcttgatcttgatgatggacgcacagtaaacgccattgtgtttattatggacccgcgacatccagaatatgaatctgatactcgcgctcaggtcatcgcgccgttgattgcggcggcgagcggtccgctgggaaccaacgcacaatacctgtttagtctggaacaggagcttatcaaactgggaatgcaggacgatgggctgaatgatttgctggtaagcgtaaaaaaactgctggcggagaattttccggatggtgtgttacgtccgggattcgcctgagtaaacttcccgcatagtggggcgtcagacgccccctcaaacattaaaatgtgagcactttatcggcactcagcgtccattgcgccagttccacaagagtaccgatttccaccccatcaatcagaggaagtgtactaatcccgcgcccgtcggtacaggttttgcacaatttcaccggtacattctgagcggtaaggatctccagcatttgctgaatgttgtagccttcccctggtttttgcccgcgcaacccggctgtgaccgcatcagacatgaggaacagacgcagatccagattgctctcctgctctcgtaacgcaatggccagccgcaagctgttaaacaaggattcgctcccgtaaggtgcgccattggcaacgatcacgattttttgcattatttactcctgtattcagggaattagacactcatcttctatcttactgcttctgcagcgtctgaccaatcggtcacatttttaaggattttcctgaaagcgcgagaaaatacgacaaaagttgccagtaatcgttattctttaaggctatggtttttcattattaccggaagttaccgacgttttgagccgtttcgttcctcgcattatcccgttttatttactcttgcttgtagcaggcggtacagctaacgcacaatctaccttcgagcaaaaagcggcaaatccctttgataataacaatgatggtctgccggatttaggcatggctcccgaaaatcatgatggggaaaaacactttgctgaaattgtgaaagatttcggcgaaaccagtatgaatgataacgggctggatactggcgagcaggcaaaagctttcgcattgggaaaagtccgcgacgcgcttagtcaacaggttaatcagcacgtagagtcctggctaagtccgtggggaaatgccagtgttgacgtcaaagtggataacgaaggacatttcaccggcagtcgtggaagctggtttgtgccgttacaagataatgatcgttatctcacctggagccagcttggtcttactcagcaggataatgggttggtgagcaatgtgggcgttgggcaacgctgggcgcgcggcaactggctggtgggttataacactttttatgacaacttgctggacgaaaatcttcagcgagcgggctttggtgccgaagcgtggggcgaatatttgcgattaagcacaaacttttatcagccgtttgctgcatggcatgaacagacagccacgcaggaacaacggatggcgcgcgggtacgacctgacagctcggatgcgcatgccgttctatcaacacctcaataccagtgtcagcctagaacagtattttggtgatcgtgttgatttgtttaactctggtacgggttatcacaatcccgtcgcgttgagtctgggattaaattacacccctgtgccattagtcactgtgacggcccagcataaacagggtgaaagtggcgaaaatcaaaataacctcgggctgaatcttaattaccgctttggtgtaccgctcaaaaaacaactttctgcgggcgaggttgccgaaagtcagagcttacgtggtagtcgctatgacaatccgcagcgaaataatctaccgactcttgagtaccgacagcgaaaaacgttaacggtgtttctggcgacaccgccgtgggatctaaaacctggcgaaacagtgccgctgaaattacaaatccgcagtcgttacggtattcggcaactgatttggcagggcgatacgcagatattaagtttgacgccgggcgcacaagccaacagcgcggagggctggacgctgatcatgcctgactggcagaacggggaaggggcaagcaatcactggcgattgtctgtggtggtggaagataaccaggggcagcgtgtctcctccaatgagatcacgctaacgcttgtcgaaccgttcgatgcattgagtaacgacgaactgcgctgggaaccgtaatcagaaaatgcgctcctgatgcacccataccgctgcttccacgcgagacttgagcttcattttcttcagcatgtgcttgacgtgcacttttactgtgctttcggtgatatccaggcggcgggcaatcatcttgttcggcaaaccctgggcaatcagcttgagaatatcgcgctcgcgtggggttaactggttaacatcgcgctcagtagtggcacggttagcgcgcaagctggcggccagaacaggcgttaatgcttcgcttaataccatttcgccagcagctgcctgatgcaatgctttcagcagatcttccggttccatatcttttaacagatagccatccgcgccgcgtttcagtgcggtgaccacatcttcttcatggttagagacgctgaataccacaatgcgcccactgagggacttttcgcgcagtttatccagcgtttccagaccgttcatgccgggcatattgagatctaacaggatcagatcgggatcaagagactccgccagttcaataccctgttcgccattactcgcttcgccaaccacggtgatatctggtgccatactgataagctgttttacgccagttcgcagcatcgggtgatcgtcaatcagcaggatagtagccggttcctgattactcatgggtatctccttggacgtctgtgaaagttttttcgggaataaaggtgaccaccacttcggtgccaccactttcacgacggcggacgcggcaatcgcctcgtaaactttgcgcacgatcgcgcattattatcatgccgtagtgattgctgcggatggcattttcaggcacgccgcagccgttatcctggacggtcagtttgacctgattatcgttttgcgccaccgtcaccacgacttcactcgcttggctatgtttgagggcgttacttaatgcctcacgggcaatttgcaacaagtggattgcctgatggctaggcaccaggcgaggcggcaattgataatccagcttcaccgggaagccaaatttggcgctgtactcttcgcaactcgcctccagcgccggacgtaatccaggctcggtgagctgcaagcggaatgtggtgagcaattcacgcaactgcgcccaggatgcattcagttcgttacggatctgacttaacagttcgcggctgctttctggcagcgcatcgccctgcatctgtaaacaactcacctgcatcttcatgcaagagagagattgggcaatagaatcatgcagttcgcgcgcaatggtggcacgctcttccatcacgatcaactgttgctgacgttcctgatggcgatccagcgccagcgtggcggtgagttgttcaaccagggtatccaccagttgttgttgatcatggctaagatgacgcccctgcggcagggtcgccagcaaaataccgtactgcgtatgagagtcagccagccgccacttcagggtcgtgccgcgatcaccaacgggtaatacgccgcgcgggcagagctggcagcctttatcatcacaagtcatatctggctggcaggtaaactcctgatgattctcttcatcatcagtgtcatacacccgcaattcgatatcacgtagcagggttaaattctgtaagccgttgagtacaggactcaggcgttcacacagcggggcgcgggaatgcaaacggcggttagcctgccataaaaaagagaggatctgatttttatgctccagcccggcggttttctcctgaacccgctgctcaagtacggcataactttcggccagttctgcagacatattgttcaacgcagttccaagcatcgccatttcgttgcgcccgctgatgtttgcgcgttgggtaaaatcgcgatgactgacggcactcgccattgccagcagttgccgccacggttgtagcagtcgcgcccgcaaccagataatagtgaacaccagtaaaagtgccataaataccgccattacccgatggaccagtaccactgtctcgatgcgcatttccgtggtgcggtcaaaaccagataccagttgatcaagcccggcaacaaactggctgacatccgcactcaccgtttctcggttttgtgcacgcatcagcgcagggatcagttcattacgccagtaatcttgtaaaccctgtaattgcgccagttgtccgtctcgttctgctgctcgagtcaactcggcgctaaatgccgtttgttccatctctttaattaagggcttgtctttctcgcttaatggcactgccgccaacagacggtaactttgcatgcgcaggcttcccgctttgttgatcgcatgggcgctgccctgaacgccttgcaccagccagccagaaaccgccatccctgccagtccaatagcagtagaaagcaacacaataagcgcaacctgattaaccagggtgagcggagagagacaacgtttaagcatgtaaacctcttccttcaggctttaaatgagcaataaccttaatgaatgtgacgatacattctggaatggcagtattctcggctattggctgaagtatacccatacccggaaagagttactccttatttgccgtgtggttagtcgctttacatcggtaagggtagggattttacagcaccgtgaaaaatctcataatttttatgaagtcactgtactcactatgggtaatgataaatatcaatgatagataaagttatcttatcgtttgatttacatcaaattgcctttagctacagacactaaggtggcagacatcgaaacgagtatcagaggtgtctatgagtcacagttccgcccccgaaagggctactggagctgtcattacagattggcgaccggaagatcctgcgttctggcaacaacgcggtcaacgtattgccagccgcaacctgtggatttccgttccctgtctgctgctggcgttttgcgtatggatgttgttcagcgctgttgcggtgaacctaccgaaagtcggctttaattttacgaccgatcagctatttatgttgactgcgctgcctagcgtttctggcgcgttattacgtgttccatactcctttatggttcctatcttcggtggtcgtcgctggacggcgttcagcaccggtattctgattattccttgcgtctggctgggttttgccgtgcaggatacctccacgccttatagcgtcttcatcatcatctctctgctatgcggctttgctggcgcgaacttcgcatccagtatggcaaacatcagcttcttctttccgaaacagaagcagggtggcgcgctgggtctgaatggtggtctgggaaacatgggcgtcagcgtcatgcagttggttgctccgctggtggtaagtctgagcattttcgcagtatttggtagccagggcgtcaaacagccggatgggactgagctgtatctggcgaatgcgtcctggatatgggtgccgttccttgccatcttcaccattgcggcgtggtttggcatgaacgatcttgctaccagcaaagcctccatcaaggagcagttgccggtactcaaacggggtcatctgtggattatgagcctgctgtatctggcaaccttcggctccttcatcggcttctccgcgggctttgcaatgctgagtaaaacgcagttcccggatgttcagattctgcaatacgctttcttcgggccgtttattggtgcgctggcgcgttctgcaggtggtgcattatctgaccgtctgggcggaactcgtgtcacgctggtgaactttattctgatggcgattttcagcggcctgctgttcctgaccttaccgactgacgggcagggcggaagcttcatggcgttcttcgcggtcttcctggcgctgttcctgacagctgggctgggtagtggttccactttccagatgattagtgtgatcttccgtaaactgacaatggatcgcgtgaaagcagaagggggttctgacgaacgtgcgatgcgtgaagcggcaaccgacacggcggcggcgctgggtttcatctctgcgattggcgcgattggtggcttctttatcccgaaagcgtttggtagcagcctggcattaacgggtagcccagtcggcgcaatgaaggtatttttgattttctatatcgcctgcgtagtgattacctgggcggtatatggtcggcattctaaaaaataaaccgttactcgtcatacttcgggttacatgtgctgcggctgcgttcattcaccccagtcacttactttagtaagctcctgggattcattcacttgccgccttcctgtaaaccgaattatatagagtaaaatatttgattatcctttgcgcggcatgatgtcgcgctttttttatgcgtcatttagttacaacatactaatgttatatggtttatttcgccggatttcattaagagccattaatatgttacccatggggaatactccttaatacccatctgcataaaaatcttaatagtttaaataactacaggtataaaacgtcttaatttacagtctgttatgtggtggctgttaattatcctaaaggggtatcttaggaatttactttatttttcatccccatcactcttgatcgttatcaattcccacgctgtttcagagcgttaccttgcccttaaacattagcaatgtcgatttatcagagggccgacaggctcccacaggagaaaaccgatgagtaaattcctggaccggtttcgctacttcaaacagaagggtgaaacctttgccgatgggcatggccagcttctcaataccaaccgtgactgggaggatggatatcgccagcgttggcagcatgacaaaatcgtccgctctacccacggggtaaactgcaccggctcctgcagctggaaaatctacgtcaaaaacggtctggtcacctgggaaacccagcagactgactatccgcgtacccgtccggatctgccaaaccatgaacctcgcggctgcccgcgcggtgccagctactcctggtatctttacagtgccaaccgcctgaaatacccgatgatgcgcaaacgcctgatgaaaatgtggcgtgaagcgaaggcgctgcatagcgatccggttgaggcatgggcttctatcattgaagacgccgataaagcgaaaagctttaagcaggcgcgtggacgcggtggatttgttcgttcttcctggcaggaggtgaacgaactgatcgccgcatctaacgtttacaccatcaaaaactacggcccggaccgtgttgctggtttcagcccaattccggcaatgagcatggtttcttacgcaagcggtgcacgctatctcagcctgattggcggtacttgcttaagcttctacgactggtactgcgacttgcctcctgcgtctccgcaaacctggggcgagcaaactgacgtaccggaatctgctgactggtacaactccagctacatcatcgcctgggggagtaacgtgccgcagacgcgtaccccggatgctcacttctttactgaagtgcgttacaaagggaccaaaactgttgccgtcacaccagactacgctgaaatcgccaaactgtgcgatctgtggctggcaccgaaacagggcaccgatgcggcaatggcgctggcgatgggccacgtaatgctgcgtgaattccacctcgacaacccaagccagtatttcaccgactatgtgcgtcgctacaccgacatgccgatgctggtgatgctggaagaacgcgacggttactacgctgcaggtcgtatgctgcgcgctgctgatctggttgatgcgctgggccaggaaaacaatccggaatggaaaactgtcgcctttaataccaatggcgaaatggttgcgccgaacggttctattggcttccgctggggcgagaagggcaaatggaatcttgagcagcgcgacggcaaaactggcgaagaaaccgagctgcaactgagcctgctgggtagccaggatgagatcgctgaggtaggcttcccgtactttggtggcgacggcacggaacacttcaacaaagtggaactggaaaacgtgctgctgcacaaactgccggtgaaacgcctgcaactggctgatggcagcaccgccctggtgaccaccgtttatgatctgacgctggcaaactacggtctggaacgtggcctgaacgacgttaactgtgcaaccagctatgacgatgtgaaagcttataccccggcctgggccgagcagattaccggcgtttctcgcagccagattattcgcatcgcccgtgaatttgccgataacgctgataaaacgcacggtcgtagcatgattatcgtcggtgcggggctgaaccactggtatcacctcgatatgaactatcgtggtctgatcaacatgctgattttctgcggctgtgtcggtcagagcgggggcggctgggcgcactatgtaggtcaggaaaaactgcgtccgcaaaccggctggcagccgctggcgtttgcccttgactggcagcgtccggcgcgtcacatgaacagcacttcttatttctataaccactccagccagtggcgttatgaaaccgtcacggcggaagagttgctgagtccgatggcggacaaatcccgctataccggacacttgatcgactttaacgtccgtgcggaacgcatgggctggctgccgtctgcaccgcagttaggcactaacccgctgactatcgctggcgaagcggaaaaagccgggatgaatccggtggactatacggtgaaatccctgaaagagggttccatccgttttgcggcagaacaaccagaaaacggtaaaaaccacccgcgcaacctgttcatctggcgttctaacctgctcggttcttccggtaaaggtcatgagtttatgctcaagtacctgctggggacggagcacggtatccagggtaaagatctggggcaacagggcggcgtgaagccggaagaagtggactggcaggacaatggtctggaaggcaagctggatctggtggttacgctggacttccgtctgagcagcacctgtctctattccgacatcattttgccgacggcgacctggtacgaaaaagacgacatgaatactagcgatatgcatccgtttattcacccgctgtctgcggcggtcgatccggcctgggaagcgaaaagcgactgggaaatctacaaagccatcgcgaagaaattctccgaagtgtgcgtcggccatctgggtaaagaaaccgacatcgtcacgctgcctatccagcatgactctgccgctgaactggcgcagccgctggatgtgaaagactggaaaaaaggcgagtgcgacctgatcccaggtaaaaccgcgccacacattatggtcgtagagcgcgattatccggcgacttacgaacgctttacctctatcggcccgctgatggagaaaatcggtaatggcggtaaagggattgcctggaacacccagagcgagatggatctgctgcgtaagctcaactacaccaaagcggaaggtccggcgaaaggccagccgatgctgaacaccgcaattgatgcggcagagatgatcctgacactggcaccggaaaccaacggtcaggtagccgtgaaagcctgggctgccctgagcgaatttaccggtcgtgaccatacgcatctggcgctgaataaagaagacgagaagatccgcttccgcgatattcaggcacagccgcgcaaaattatctccagcccgacctggtctggtctggaagatgaacacgtttcttacaacgccggttacaccaacgttcacgagctgatcccatggcgtacgctctctggtcgtcagcaactgtatcaggatcaccagtggatgcgtgatttcggtgaaagcctgctggtttatcgtccgccgatcgacacccgtagcgtgaaagaagtgataggccagaaatccaacggcaaccaggaaaaagcgctcaacttcctgacgccgcaccagaagtggggtatccactccacctacagcgacaacctgctgatgctgactttaggtcgcggtggtccggtggtctggttgagtgaagccgatgccaaagatctgggtatcgccgataacgactggattgaagtcttcaacagcaacggtgctctgactgcccgtgcggttgtcagccagcgtgttccggcagggatgaccatgatgtaccacgcgcaggaacgtatcgttaacctgcctggtagcgaaattacccaacagcgtggtggtatccataacagcgtcacccgtatcacgccgaaaccgacgcatatgatcggcggctatgcccatctggcatacggctttaactactatggcaccgtaggttctaaccgcgatgagtttgttgtagtgcgtaagatgaagaacattgactggttagatggcgaaggcaatgaccaggtacaggagagcgtaaaatgaaaattcgtagtcaagtcggcatggtgctgaatctcgataagtgcatcggctgccacacctgtagtgttacctgtaaaaacgtctggaccagccgtgaaggcgtggaatatgcgtggttcaacaacgtggaaaccaagccgggccagggcttcccgactgactgggaaaaccaggaaaaatacaaaggcggctggatccgtaaaatcaacggcaaactgcagccgcgcatgggtaaccgtgccatgctgctgggtaaaatcttcgctaacccgcatctgccggggatcgacgattattacgagccgttcgattttgactatcagaacctgcataccgcgccggaaggcagcaaaagccagccgattgcccgtccgcgtagcctgattaccggggaacggatggcgaaaatcgaaaaagggccgaactgggaagatgacctgggcggtgagtttgacaaactggcgaaagacaagaacttcgacaacatccagaaggcgatgtatagccagttcgaaaacaccttcatgatgtatttgccgcgcctgtgcgaacactgcctgaacccggcatgtgtggcgacctgcccgagcggtgcgatttacaagcgtgaagaagatggcatcgtcctgatcgaccaggataaatgccgtggctggcgtatgtgcatcactggatgcccgtacaaaaaaatctacttcaactggaagagcggtaagtctgagaagtgcatcttctgctatccgcgtattgaagcgggtcagccgaccgtgtgcagtgaaacctgtgtcggtcgtatccgttatcttggcgtgctgttgtacgatgccgacgctattgaacgtgcagccagcaccgagaacgagaaagatctttaccagcgtcagctggacgtgttcctcgatccgaacgatccgaaagtcatcgagcaggcgattaaagacggtattccgctgagcgttattgaagccgcacagcagagcccggtttataaaatggcaatggaatggaaactggcgctgccgctgcatccggaatatcgcacactgccgatggtctggtacgtgccgcctctgtctccgattcagtctgcagcagacgcgggtgagctgggtagcaacggcattctgccagacgtcgaaagcctgcgtattccggtacagtatctggcgaatctgctgaccgccggtgataccaaaccggtactgcgcgcactgaaacgtatgctggcgatgcgtcattacaaacgtgctgaaaccgttgacggtaaagttgatacccgtgcgctggaagaggtcggtctgaccgaagcccaggcacaggagatgtaccgttatctggcgattgctaactacgaagatcgctttgtggtgccgagtagtcatcgtgaactggcacgggaagccttcccggagaaaaatggctgcggctttacctttggtgatggctgccacggtagtgataccaaattcaatctgttcaacagccgtcgtatcgatgccatcgatgtgaccagcaaaacggagccgcatccatgatcgaactcgtgattgtaagccgtctccttgaatatccggatgctgccttatggcagcatcaacaagagatgtttgaggcgattgccgcgagcaaaaatctgccaaaagaggatgcccatgcgctgggcattttcctgcgcgatttaacgacgatggatccgctcgatgcccaggcgcagtacagcgaactgttcgaccgtggccgcgccacgagtctgttgctgtttgaacatgtgcacggcgaatcccgcgaccgcggccaggcgatggtggacctgctggcgcagtacgagcagcacggcttgcagttaaacagccgcgaattgccggaccatctgccgctgtatctggagtacctggcgcagctgccgcaaagcgaagccgtggaaggtttgaaagatatcgcgccgattctggcattgctgagcgcgcgtctgcaacagcgtgaaagccgttatgccgtgctgtttgatctgctgctgaaactggcgaataccgctatcgacagcgacaaagtggcggaaaaaattgccgacgaagcgcgcgatgatacgccgcaggcgctggatgctgtctgggaagaagagcaggttaaattctttgctgacaaaggctgcggtgatagtgcaatcactgcgcatcagcgtcgctttgccggtgccgtcgcgccgcaatatctgaatatcaccaccggaggacagcactaatgcaattcctgaatatgttcttctttgatatctacccgtacatagccggggcggtcttcctgattggtagctggctgcgttatgactacgggcagtacacctggcgcgcggcgtccagccagatgctggatcgcaaagggatgaacctggcgagcaacctgttccatatcgggattctggggatttttgtcggtcacttcttcggtatgctgacgccgcactggatgtatgaagcctggctgccgattgaagtgaaacagaaaatggcaatgtttgctggtggtgccagcggcgtgctgtgtctgattggcggcgtgctgttgctgaaacgtcgtctgttcagcccacgcgtgcgtgcaaccactaccggagcggatatcctgatcctgagcctgctcgttatccagtgcgcgctgggcctgttgaccattccgttctccgctcagcatatggacggtagcgagatgatgaaactggttggctgggcgcagagcgtggtgaccttccacggtggcgcttctcaacacctcgatggtgtggcgtttatcttccgtctgcacctggtgctggggatgacgttattcctgctgttcccgttcagccgtctgatacacatctggagcgtaccggtggagtatctgacacgtaagtaccagctggtgcgcgctcgtcactaagcgaattttagttcacatagaccctgcttcggcggggtttttttatgggcacggtgcggggtgagttgtcggatgcgcttcgcttatccgacctacaggggaggatattgtaggcccggtaaacgtggtgccatcgggcaaaattagctcggagtaacaggttttgattatttaaggaagcgatggtggtgggggaaggattactcagcgctgcgcgcttcgcccttcgggtcgttgcctgcggcaacgctctcagcctggcgctcaagagcaaccttggtcgaagcttcagttccttccccgcttgggcagaatatttgattgcggatagctttgagaattccggggcttttgaaagtgatggtggtgggggaaggattactcagcgctgcgcgcttcgccctagcggtcgttgcctgcggcaacgctctctcgctgacgctcgagccgaaccttaatcgaagcttctcatccttccccgcatgggcagaatatttgattgcggattcgcttgagagttcagggacttttgaaagtgatggtggtgggggaaggattactcagcgctgcgcgcttcgcccttcgggtcgttgcctgcggcaacgctctctcgctggcgctcgagtgctaccttggtcgaagcttctcatccttccccgcatgggcagaatatttaattgcggattcgttgggaagttcagggacttttgaaagtgatggtggtgggggaaggattcgaaccttcgaagtcgatgacggcagatttacagtctgctccctttggccgctcgggaaccccaccaggggtaattcaaattttgaggtaatgcttgagatggtggtgggggaaggattattcgtcgcttcgctcctcacccttcgggccgttgcctgtggcaacgttctctcgctttcgctcgaatcgaaccttagtcgaaggttctcacccttccccgatgagtgcaaactttcacaatctcaccgaagttaccacatcgctgtggtgaattatggtggtgggggaaggattcgaaccttcgaagtcgatgacggcagatttacagtctgctccctttggccgctcgggaaccccaccacggggtaatgctttttactggcctgctcccttatcgggaagcggggcgcatcatatcaaatgacgcgccgctgtaaagtgttacgttgagaaaaatgaactggttgcgtaattttcatccgtaacggattaaaggtaaccagttatttttgctggcgattaaagaataatcgttcgattaccgtaaacaaagacgcgctgtgccagtactttgtatagtgcacgacttaagacgtttttctcgacgtcacgacctgcgcgcatcatatcttcagctgtgtaggtatgatcgacatgaataacgtcctgcatgatgattgggccttcgtccagattgtcattcacatagtgagcggttgcgccaataatcttcacaccacgttcataggcctggtgataaggacgtgcgccaataaacgctggcaggaaactatggtgaatattgatgatcttattcgggaagcgtgccacaaattccggcgttaatacccgcatatacttcgccagcaccacgtagtcaggttgataagcatcaatggcatccgccatcttttgatcgtgctcgttgcgggttaacccttcatggcttaccagctcaaacggaatatcaaaacgctcaaccagagaacgtaaagtatcgtggttaccaataactgccgcgatttcgacatccaggccgccgtaattggctttcatcaacaaatcgccaaggcaatgcgcttctttagtgaccagaatcactatccggcgacgaccggcaggattcagctcacgcacggagccttctggcaatgcgctatcgagatccgccagcagggtggaatcattaaaaatcccttccagttccgtgcgcataaaaaagcgcccggtacggtgatcaacaaattcattgttctgtacgatatttaactcgtgcttgtagcaaatattggtaatacgtgcgatcagacctttttggtccggacaaatagtacgcagaactttacgttggagactatgcattgctggaaaaaccttgttgagagtgtttgctaaaccgtaccgtcaaccattattggccgcagcactttttaaattttttaccactaccacaagggcagggatcgttgcgaccaaactgcggacgtgtaccgtcaatatagtaccattgaccgttttctttcaaaaatcggctacgttcaattattgcacctgttttaccaccttcggtaaatcgagcaacaaaactgacaaatccgatattgtcggcgtcctgccaacaatgttcaaatacggtcaatcccaaccattcagtatgcgcaaatccggccatcaattcggcacgtaacgccgctgctccacaagagggatgccaggtctttattaaataatctgcgtcttgcatcacaaaagcgcagtaacggctacgcatgagatgttctggatcaggtgcaaccttttcaccagacacataagggtggcaacataggctatactcgacagcactaccacagggacaaagctgagacacaaataatctccctggaaacaataacggcgtattaaccgcctgagtagcactatgttaaccgagcagtagcgatgtggctacgattgcattccaggggaatcttgcgggaataatgagaaagataaaaatagggctggcgctgggatctggcgcggcgagaggttggagccatattggcgttattaatgcgctaaaaaaagtgggtattgaaattgatatcgttgcaggatgtagtattggtagcctggtgggcgctgcctatgcatgcgatcgattatctgcgctggaagattgggtgacctctttcagttattgggatgttttacgcctgatggatctctcctggcagcgcggtgggttactgcgcggcgagcgtgtcttcaatcaataccgcgaaataatgccggaaacagagatcgaaaattgttcccgtcgctttgcggctgttgccaccaatttaagtacgggacgtgaattatggtttactgaaggcgatctccatcttgctattcgcgcaagttgcagtattccaggactcatggcacctgttgcacataacggctactggctggttgatggagcagtcgttaacccaattcctatttccctcacgcgtgcattgggggctgatattgtgatagcggttgacctgcagcacgatgctcatttgatgcaacaagatttgctctcctttaatgtcagtgaagaaaatagcgagaatggtgattctctgccgtggcatgcgcgtctgaaagaaaggttaggcagcataacgacacgtcgggcggtgacagcgccaacggcaacagagattatgaccacttctatccaggtgctggagaaccgccttaaaaggaaccgcatggcaggtgatccgcccgatattctgattcaacctgtttgcccgcaaatatctacgcttgatttccatcgcgcgcacgctgccattgcggccggacagctggcagtggaaaggaaaatggacgaacttttgccgttggtacgcaccaacatttgaccagaatttttatctacacttaagttaattctgacaggcgcaggtggcaatagcatgccactattgagtaaagccagtcaggggagagaacatgacgcagccattggtcggaaaacagattctcattgttgaagatgagcaggtatttcgcagccttctggatagttggttttccagtttgggagcgacaacggtactggcggctgatggggtggatgcccttgagttgctgggaggtttcactccagacctgatgatatgtgatatcgcgatgccacgaatgaacgggcttaaactgctggagcatatacgtaacagaggcgaccagaccccagttctggtgatatctgccactgaaaatatggcagatattgccaaagcgttacgtctgggcgttgaagatgttttgctgaaaccagttaaagatctgaatcgcttgcgcgagatggtttttgcctgtctctatcccagcatgtttaatagccgcgttgaggaagaggaaaggctttttcgcgactgggatgcaatggttgataaccctgccgcagcggcgaaattattacaggaactacaaccgccggttcagcaggtgatttcccattgccgggttaattatcgtcaattggttgccgcggacaaacccggcctggtgcttgatattgccgcacttagcgaaaacgatctggcattttattgccttgatgtcacccgagctggacataatggcgtacttgctgccttgttattacgcgcattgtttaacggattattacaggaacagcttgcacaccaaaatcaacggttgccagagttgggcgcgttattgaagcaggtaaaccatttacttcgtcaggccaatctgccggggcagtttccgctattagttggctattatcatcgcgaactgaaaaatctcattctggtttctgcgggtctgaatgcgacgttaaataccggcgaacaccaggtgcaaatcagtaatggtgttccgttaggcactttaggtaacgcttatttgaatcaattgagccagcgatgcgatgcctggcaatgccaaatatggggaaccggtggtcgactgcgcttgatgttgtctgcagaatgagcaaacgataacgcgggctaaatttgcattacctgctaatgtcggctggtggtactatcgtcgccattcgtataagtaattgtcttaattatgctaactcgcctccttttcagaacttagccccttcggggtgctgatatactgggatgcgatacagaaatatgaacacgttcaaaacacgaacagtccaggagaatttaaatggctgccattaatacgaaagtcaaaaaagccgttatccccgttgcgggattaggaaccaggatgttgccggcgacgaaagccatcccgaaagagatgctgccacttgtcgataagccattaattcaatacgtcgtgaatgaatgtattgcggctggcattactgaaattgtgctggttacacacagttctaaaaactctattgaaaaccactttgataccagttttgaactggaagcaatgctggaaaaacgtgtaaaacgtcaactgcttgatgaagtgcagtctatttgtccaccgcacgtgactattatgcaagttcgtcagggtctggcgaaaggcctgggacacgcggtattgtgtgctcacccggtagtgggtgatgaaccggtagctgttattttgcctgatgttattctggatgaatatgaatccgatttgagtcaggataacctggcagagatgatccgccgctttgatgaaacgggtcatagccagatcatggttgaaccggttgctgatgtgaccgcatatggcgttgtggattgcaaaggcgttgaattagcgccgggtgaaagcgtaccgatggttggtgtggtagaaaaaccgaaagcggatgttgcgccgtctaatctcgctattgtgggtcgttacgtacttagcgcggatatttggccgttgctggcaaaaacccctccgggagctggtgatgaaattcagctcaccgacgcaattgatatgctgatcgaaaaagaaacggtggaagcctatcatatgaaagggaagagccatgactgcggtaataaattaggttacatgcaggccttcgttgaatacggtattcgtcataacacccttggcacggaatttaaagcctggcttgaagaagagatgggcattaagaagtaacatccgtatcggtgttatccacgaaacggcgttgagcaatcgacgccgtttttttatagcttattcttattaaattgtcttaaaccggacaataaaaaatcccgccgctggcgggattttaagcaagtgcaatctacaaaagattattgcttgatcaggaaatcgtcgagggatttaccttgctcatccattgcttttttgattacagctggagtacggccttggccagtccaggttttagtttcgccgttttcgtcaacgtagctatattttgccggacgctgagcacgtttagctttggtgccagatttaacggcagcaaggctattcagcagttcgttcgggtcaataccgtcagcgatcagcatttcgcgatattgctgcagtttacgagtgcgctcttcaacttcagcagcagccgcgctttcttcttcgcgacgttcgttaacaacaacttctaatttttccagcatttcttccagcgtttcaagtgtacattctcttgcctgcgcacgaagagtacggatgttgttcagaattttaagtgcttcgctcattgtagtaatctcaaacttatattggggtggtttgttgaggtaataatagagccttaaattcagttgtgcaatagccaggaatgtaaggaattcaaaattgttctttattttgtgccgccaataaatatcttttcataaaattagccagaaaagacgcggcatatagccctatttacaccgatgatttcgcagcacgtgaggttaaaacttcctgattcatgtcacattttatggggagattatcgtaggctgacgacctttcagtcttctgtattagttgtgtttacgagaattccctattaagcgaatgatgaaaagtagaacagtcgcaataagagcatggacttagtattgcactatctcctggaggtcaacagagggctattacttgcgcaacaggttaaagattgtgaatagttaccagcagtcatttacccgcttataacaagcgaggcagttgtaatgatagctcagaaggattatgcaaggcttcgtaagggagaacgcatatacccacttctgtgcatactgttgagctgaaaaactgacgaattatgataaactccagccaactttatttcatatcattgagggcctgtggctgatggcacagctatatttctactattccgcaatgaatgcgggtaagtctacagcattgttgcaatctagttacaattaccaggaacgcggcatgcgcactgtcgtatatacggcagaaattgatgatcgctttggtgccgggaaagtcagtagccgtataggtttgagtagccctgcaaaattatttaaccaaaatagtagtttatttgatgagattcgtgcggaacatgaacagcaggcaattcattgcgtactggttgatgaatgccagtttttaaccagacaacaagtatatgaattaagcgaggttgtcgatcaactcgatatacccgtactttgttatggtttacgtaccgattttcgaggtgaattatttattggcagccaatacttactggcatggtccgacaaactggttgaattaaaaaccatctgtttttgtggccgtaaagcaagcatggtgctgcgtcttgatcaagcaggcagaccttataacgaaggtgagcaggtggtaattggtggtaatgaacgatacgtttctgtatgccgtaaacactataaagaggcgttacaagtcgacagtttaacggctattcaggaaaggcatcgccacgattaataagaatttctttactgacagggtgagcagggcacttttatcctgtcagttcgttttacgcacttcttccgggctatatacccttctcggcagttttttaacgccgctatacgcctcacagggctcttaagcaccgacgttgacttgtgacctgtaaagtacaatatccctgtgtttaggcgttatacatcgtcgcaaatatgatgaaggctaatgctgtcggtttatggaaaagttgctttgggtaaacaaaaaatacggccccagaagggcaatgccgttcacttaagaggagcggcactatgtttcacaggataacgggtttttgatatcttaaccgacctcggccttgatggtcgggggcgttttgttatgaacaccacttccagagcaccccgaagatgctccagtcgtttcgggatggtccctggtgacgccgtgtttcccagctctatcatttctgatgcgatattcttccacgcaggcagtagccagtggcggttacaacccttctggttcagcgtcagcagcaggtcttcgctgtaaaaaagtttatcaaacaacgtaatagagttatccgggatggtggcgagcatggagtgggccagcacagtttcgctctgccggtaaggtgcggtcacggcattcagcagaatgtgacttcccaggttcattaaggccaccagacgcataaccgggtaggcgttctgccgcttagtggatgtgttggcagacccataatattcacgcagctcgggtttatcaggtgtcctgaactgtgcgccatcaatggcaaaaagttgcaggccgtgccagtcatccttcaggtaacgttccgcgcccctgtctgtgcggtctggcggaagagccattccactggggcggcccccacgcgctgacgcgcctgggtgacagcgctgcgggccagcaggttcatccccgcttcgccatccgcgctcaggttcagacggcgaacaacatcggtaattggctcattgcaccaccatccagataaccatgtcccccggtaaacgacggcggcgaacggtcgcatgagcagaaagcgtcaggcagtgttgtatccactcggtgggaaggtgttctgcaaatagttgtgcagagggcggaggcataagcggatggtcactgaaatcgagcagatcattgagaagtggcataagaaaacggctccctgttgtggaagccgttatagtgcctcagtttaaggatcggtcaactaatccttaactgatcggcattgcccagaaggggccgtttatgttgccagacagcgctactgattaagcggattttttcgcttttttctcagctttagccggagcagcttctttcttcgctgcagtttcaccttctacataatcacgaccgtagtaggtatccagcagaatctgtttcagctcggagatcagcgggtaacgcgggttagcgccggtgcactggtcatcgaatgcatcttcagacagtttatccacgttcgccaggaagtctgcttcctgaacgccagcttcacggatagatttcggaatacccagttcagctttcagcgtttccagccatgccagcagtttctcgatcttagcagcagtacggtcgcccggtgcgctcagacccaagtggtcggcaatttcagcataacgacggcgagcctgcggacggtcatactggctgaatgcagtctgcttggtcgggttgtcgttcgcattgtagcgaataacgttacaaatcagcagggcgtttgccagaccgtgcggaatatggaactgggaacccagtttgtgcgccatactgtgacatacacccaggaaggcgttcgcaaacgcgatacccgcgatagtcgctgcactgtgaacacgttcacgcgctaccggatttttagacccttcgtggtaggacgctggcagatattctttcagcagtttcagtgcctgcagagcctgaccatcagagaactcagatgccagtacagaaacataagcttccatggcgtgagttactgcgtccagaccaccgaaagcacacagggacttcggcatgtccataaccaggttggcgtcgacaatcgccatatccggagtcagcgcatagtctgccagcggatatttctgaccagtagcgtcgtcagttacaaccgcaaacggagtgacttcagaacctgtaccagaagtggtggtgacagcgatcattttcgctttcacgcccattttcgggaacttgtagatacgtttacggatatccataaagcgcagcgccagctcttcgaagtgagtttccggatgttcgtacataacccacatgatcttcgcggcgtccatcggggaaccaccacccagcgcgataatcacgtctggtttgaaggagtttgccagttctgcacctttacgaacgatgctcagggtcgggtccgcttctacttcgaagaagacttcagtttcaacgcctgctgctttcagtacggaagtgatctgatcagcataaccattgttgaacaggaagcggtcagtcacgatgagcgcacgtttgtggccatcagtaatcacttcatccagcgcgattggcagggagccacggcggaagtagatagatttcggaagtttgtgccacaacatgttttcagctcgcttagcaacggttttcttgttgatcaggtgtttcggaccaacgttttcagagatggagttaccaccccaagaaccacaacccagagtcagggaaggtgcgagtttgaagttatacaggtcaccgataccaccctgagacgctggggtgttaatcaggatacgcgccgttttcattttctgaccgaagtaagaaacgcgagccggttggttatcctggtcagtgtacaggcaagaggtatgaccgataccgcccatagcaaccagtttctctgctttttctaccgcgtcttcgaaatctttagcgcggtacattgccagagtcggggacagtttttcatgtgcgaacggttcgctttcatcaacaacggtcacttcaccgatcagaatcttggtgttttctggtacagagaagcctgccagttcagcaattttataggctggctgaccaacgatagccgcgttcagcgcaccgtttttcaggataacatcctgaacagctttcagctctttaccctgcaacagatagccgccgtgggttgcaaaacgttcacgtacagcgtcataaacagagtcaacaacaacaacagactgttcagaagcacagattacgccgttgtcgaaggttttggacatcagtacagatgcaactgcacgtttgatatcagcagtttcatcgataacaactggagtgttgcccgcgcctacaccgatagctggtttaccggagctgtatgcggctttaaccatgcccggaccaccagtcgcgaggatcaggttgatgtctgggtggtgcatcagtgcgttagacagttcaacagaaggttgatcgatccagccgatcagatctttcggagcaccggcagcgatagcagcctgcagaacgatatcagccgctttgttggtggcatcttttgcacgcgggtgcggggagaagataatggcgttacgggtcttcagactgatcaggcttttgaagatagcagtactagtcgggttagtggtcggaacgataccgcaaataataccgattggttcagcgatagtgatggtaccaaaagtgtcgtcttcagacagaacaccacaggttttttcatctttataggcgttgtagatatattcagaagcaaagtggtttttgatcactttatcttcgacgatacccatgccggattcggcaacggccattttcgcgagtgggattcgagcatctgcagcagccagagcggcggcgcggaagattttgtctacttgctcttgagtgaaactggcatattcacgctgggctttttttacacgctctacgagtgcgttaagttcagcgacattagtaacagccataatgctctcctgataatgttaaacttttttagtaaatcatctgctcgaatacgagagtatagtcagtgcggtgatgatttgcttaacctatgaaaatcaaaagcttactcgcgctcacactcactgtgatttactaaaagagtttaaacattagagttattatctctaatgcgtcacttccaggtggcgtaagcaagattactcacttctgggtactgattacgtgatccaaatcaaatttttgcaaagctgacacctttcagcatcgcttttcgccattatagctaacagttaataaattgtagtatgatttggtggctacattagcatgttttgcacaactagataacaataacgaatgatagcaattttaagtagttaggaggtgaaaaatgctgtcaaaaggcgtattgtcagcgcgtcttttcaaccttatttatggctaacattatccggcttttgcttcggagctaaccgtgattcagaccttttttgattttcccgtttacttcaaatttttcatcgggttatttgcgctggtcaacccggtagggattattcccgtctttatcagcatgaccagttatcagacagcggcagcgcgaaacaaaactaaccttacagccaacctgtctgtggccattatcttgtggatcagcctttttctcggcgacacgattctacaactttttggtataagtattgatagcttccgtatcgccgggggtatcctggtggtgacaatagcgatgagcatgatcagcggcaagcttggcgaggataaacagaacaagcaagaaaaaagtgaaaccgcggtacgtgaaagcattggtgtggtgccactggcgttgccgttgatggcggggccaggggcgatcagttctaccatcgtctggggtacgcgttatcacagcattagctatctgtttggtttctttgtggctattgcattgttcgctttatgttgttggggattgttccgcatggcaccgtggctggtacgggttttacgccagaccggcatcaacgtgattacgcgtattatggggctattgctgatggcattggggattgaatttatcgttactggtattaaggggattttccccggcctgcttaattaattcctttcaaatgaaacggagctgccatgctccgtttacttcgtcattatttttactttgttcccgcgcagttatcaaaagcaaaaggaataggtaaaaatattcttctcaaattacagttagttataaggatttccttaactgcttctcctcaccatcatgttattttcgccacatcataatcctgggcttgctgaagaataattgaaatgatattattaattccactgcctttggtagaggaaagtgctaaataataatcaattgttaaattattgtgcatttcactactggaactgtaatcagaaaagatagacatgcttagccaatctctatttgattgaattgaaagatgtttgttaaggcatggatgcaagctatagattctgatacggtcaataaaagagaattgcttaacaattttgcaaaatgtattggcgagtaagaaccgcatttggtactttccgggcaaccgccagacgattctttattggtaatgagaataattaacaattaaagagcgtcgcgaaagaataatgtgtctcgacaggggagacacagtacgaatcgacataaggtgatcgtctgaatcaccagaataaataaagtcggtgatagtaatacgtaacgataaagtaacctgacagcagaaagtctccgagcctgtgcagggtcccaatccgggattacacatgctggttaataccagtaattataatgagggagtccaaaaaacaatgaccaacatcaccaagagaagtttagtagcagctggcgttctggctgcgctaatggcagggaatgtcgcgctggcagctgatgtacccgcaggcgtcacactggcggaaaaacaaacactggtacgtaacaatggtagtgaagttcagagtttagatccgcacaaaattgaaggtgttccggagtctaatatcagccgagacctgtttgaaggcttactggtcagcgatcttgacggtcatccagcacctggcgtcgctgaatcctgggataataaagacgcgaaagtctggaccttccatttgcgtaaagatgcgaaatggtctgatggcacgccagtcacagcacaagactttgtgtatagctggcaacgttctgttgatccgaacactgcttctccgtatgccagttatctgcaatatgggcatatcgccggtattgatgaaattcttgaagggaaaaaaccgattaccgatctcggcgtgaaagctattgatgatcacacattagaagtcaccttaagtgaacccgttccgtacttctataaattacttgttcacccaagtactagtccggtgccaaaagccgctatcgagaaattcggcgaaaaatggacccagcctggtaatatcgtcaccaacggtgcctataccttaaaagattgggtcgtaaacgaacgaatcgttcttgaacgcagcccgacctactggaacaacgcgaaaaccgttattaaccaggtaacctatttgcctattgcttctgaagttaccgatgtcaaccgctaccgtagtggtgaaatcgacatgacgaataacagcatgccgatcgaattgttccagaagctgaaaaaagagatcccggacgaagttcacgttgatccatacctgtgcacttactattacgaaattaacaaccagaaaccgccattcaacgatgtgcgtgtgcgtaccgcactgaaactaggtatggaccgcgatatcattgttaataaagtgaaagcgcagggcaacatgcccgcctatggttacactccaccgtatactgatggcgcaaaattgactcagccagaatggtttggctggagccaggaaaaacgtaacgaagaagcgaaaaaactgctggctgaagcgggttataccgcagacaaaccgttgaccatcaacctgttgtataacacctccgatctgcataaaaagctggcgattgctgcctctagtttgtggaagaaaaacattggtgtaaacgtcaaactggttaaccaggagtggaaaacgttcctcgacacccgtcaccagggtacttttgatgtggcccgtgcaggctggtgtgctgactacaacgaaccaacttccttcctgaacaccatgcttagcaacagcagcatgaataccgcgcattataagagcccggcctttgacagcattatggcggaaacgctgaaagtgactgacgaggcgcagcgcacagctctgtacactaaagcagaacaacagctggataaggatagcgccattgttcctgtttattactacgtgaatgcgcgtctggtgaaaccgtgggttggtggctataccggcaaagatccgctggataatacctatacccggaatatgtacattgtgaagcactaatggcaatacgtggggcaggagtgtcctgctccacggtgtctgatttttatcgcattacagaaggcacaggccagaaggtagggcaatgttaaaatttattctacgtcgctgtctggaagcgattccgatgctatttattcttattactattagcttctttatgatgcgcctcgcgccgggaagcccttttaccggcgaacgtactttaccgccagaagtgatggccaatatcgaagcgaaatatcatcttaatgatccgatcatgacacagtatttcagctacctgaaacaactggcgcacggtgatttcggtccaagctttaaatataaagattatagcgtcaatgacttggttgcatccagttttcccgtttctgccaaactgggagccgcagcatttttccttgcggtaatactgggtgttagtgctggcgttattgccgcattaaaacaaaacaccaaatgggactataccgtgatggggctggcaatgaccggggttgttatccccagttttgtggttgcaccattattagtcatgatatttgcgatcattttgcattggctgccgggcggtggctggaatggtggggcgcttaaattcatgatattgccgatggtggcgttgagtctcgcttatatcgccagtattgcgcgtattacccgtggctctatgattgaagtattacactccaattttattcgtactgcccgggcgaaagggttacctatgcggcggatcattttacgtcacgcattaaaacctgctctgttacccgtgctctcttatatgggccccgcatttgtcggcattattaccggttctatggttatcgaaaccatttatggtttgccggggattggacaactgttcgttaatggcgcattgaaccgtgactattccttagtgttaagcctgaccatcctggttggtgctttaaccattttgtttaatgccattgtcgatgtgctatatgcggttatcgacccgaaaatccgttactgatactggagctcgcgatgatgttaagtaagaaaaacagcgagacgctggaaaatttcagtgaaaagctggaggtcgaagggcgcagcttgtggcaggacgcacgtcgacgttttatgcataaccgtgcggcggttgccagtctgatagtgctggtgctgatcgcgttatttgtaatcctggcaccgatgctttcccagtttgcctatgacgatactgactgggcgatgatgtccagcgccccggatatggagtccggtcactactttggtactgacagttccggtcgcgacctgcttgtgcgcgttgcgattggcgggcgtatcagtctcatggtcggtgttgctgcggcactggtggctgtggtcgtcgggacactttatggtagcctttccggttatctgggcggtaaagtggatagcgtaatgatgcgtctgctggaaatcctcaactccttcccattcatgttcttcgtcattttgctggtgacctttttcggtcaaaacatcctgctgattttcgtggcgataggcatggtttcctggctggatatggctcgtattgtgcgtgggcaaaccctgagtctgaagcgcaaagagtttattgaggcggcacaagttggcggtgtaagcacaagcggcattgttattcgccacattgtgccgaatgtactcggtgtggtggtggtctacgcaagtcttctggtgcccagcatgatcctctttgaatctttccttagcttcctggggttgggtacgcaagagccgttaagcagctggggtgcattgctgagtgatggcgcgaacagcatggaagtctctccatggttattgttgttcccagcgggattcctcgtggtgacgctgttttgtttcaactttatcggcgatggcttgcgtgatgccctcgacccgaaagatcgttaaggagtgcagccatgagcgtaattgaaactgcaactgtgccgctcgcacaacaacaggctgacgcactgctgaacgtgaaagatttgcgtgtcacctttagtaccccggacggcgacgtcacggcggtcaatgatttgaatttttccctacgtgccggagaaacgctgggtattgtaggtgagtctggtagcggtaaaagccaaactgcatttgcgttgatgggcctgttggctgccaacggacgtattggcggaagcgcaaccttcaatgggcgtgaaatcctcaatttgccagagcatgaactcaataaactgcgcgctgaacaaatcagtatgatttttcaggacccaatgactagcttgaatccctatatgcgcgtcggtgagcagttgatggaagtgctgatgctgcataagaacatgagcaaagctgaggcgtttgaagagagcgtgcggatgctcgatgcggtaaaaatgccggaagcgcgtaaacgcatgaaaatgtacccgcacgaattttctggcggcatgcgtcagcgagtcatgattgcgatggccttgttatgtcgacctaagctgctgattgcggatgaaccaacaactgcgctggacgtcaccgtacaggcgcagatcatgacgctattaaatgaactgaagcgggaatttaataccgccatcattatgatcacccacgatcttgtcgtggtggcggggatctgcgacaaagtgctggtaatgtacgccgggcgcacgatggaatatggcaacgcgcgcgatgtcttttatcaacccgttcatccttattctatcggtttgctcaacgcggtgccgcgtctcgatgcggaaggtgaaacaatgttgaccatcccgggtaatccgccaaacctgctgcgattaccgaaaggttgcccgttccagccacgttgtccgcatgcgatggaaatttgtagtagcgcaccgccgctggaagagtttacgcctggccgtctgcgtgcttgctttaaaccggtggaggaactgttatgaatgctgtaactgaaggaagaaaagtcctccttgaaatcgccgatcttaaagtgcactttgaaatcaaagatggcaaacagtggttctggcaaccgccgaaaacgctcaaagccgtcgatggtgtcactcttcgcctgtatgaaggggaaacattaggtgtggtaggggaaagcggatgcggtaagtccacctttgctcgcgccatcatcggtttggtcaaggcgaccgacggtcatgttgcctggttaggtaaagagttgctgggcatgaaacccgatgaatggcgtgccgttcgcagtgatattcagatgattttccaggatccgttggcaagcctaaacccgcgtatgaccatcggcgagatcatcgctgaaccactgcgtacttatcatccgaaaatgagtcgccaggaagttcgcgagcgcgtgaaggcgatgatgctgaaagtcgggttattgcctaacctgattaaccgctatccgcatgagttctctggtgggcagtgccagcgtatcgggattgcgcgtgctcttattcttgaaccgaagctgattatctgtgatgagccggtgagcgcgctggacgtgagtattcaggcacaggtggtcaacctgctccagcaattgcaacgtgagatgggattgagtttaatttttatcgctcatgacctggccgtggtaaaacacatttccgatcgtgtgttggtgatgtatctcggccatgcggtagaactggggacctatgatgaggtctaccacaatccactacatccttacaccagggcattgatgagcgcagtccccatacctgatccggatctggagaagaacaaaaccatccagttactggaaggggaattaccgagcccgatcaacccgccttccggttgtgttttccgtacccgttgcccgattgccggtccagagtgcgccaaaacacgtcctgttctggaggggagtttcagacactccgtttcttgcctgaaagtcgatccgctttaaaaacaataagggctgacagttgtcagccctttttcacgctaaaagcgattatttattcccgccagatgatatggcaaagtttgtgatctttttcgcggcataacagaatgcgggcaaaaacatcgttgatttcaccatcttcactgtccgccagaccaatcaccacttcggcaaaaaagtccgggttcaaatcgaaatcaacatgttcctgccagtcttccgccggatcgaataactccgcgccgccgcgctcttcaaactgaagattgaacagcaggacatcagctggatcgagattgtcggcagccagttcgagaaaaatatcgtaggcctgttcaagcgtttcatcttcagtcaggcgattgtttagatccatatccatagttactacctgtttaacctctgttggcgacgttttacagcaacggactgaagaagtaaaacagtcgctcggcgacacgttgccataatggacgttttagccataaacgggcatcgagcagacgactacggctaatataatcgtcctgaacggcggcgaggtcagcaccaaaacctttatcgtcgattgccagggtaatctcgaaatttagccacagactacgcatatcaaggttaactgtgccaaccagacttagttcgccatcgaccagcacgctcttggtatgcagtaacccgccttcaaactgataaattttaaccccagcagccagcagttccgtaaagaatgcgcgactggcccagccgaccagcatgctgtcattttttcgcggaaggataatactgacatccaccccgcgctgcgccgccgtgcaaatcgcatgaagtaaatcatcgcttggcacaaagtagggcgtggtcatgatcaaatattcacgcgcgctataagccgcagtcaataatgcctggtgaatgagatcttccggaaagccggggccagaagcaattgtgtgaatggtgtgaccgctggcctgttcaaacggcataatattgacatctggtggtggcggcagaatacgttttccggtttcaatctcccagtcgcaggaataaataatccccatcgcggtggcgatagggccttccatacgcgccatcagatcaatccattgccctacgcccgcatcttgtttgaagtagcgaggatcgaccatattcatgctgccggtgtacgcgatgtaattatcgatcatgatcatcttgcgatgttggcgcaggtccatacggcgtaaaaacacacgcatcagattgacctttaaggcttcgaccacttcaataccggcattacgcattagctcgggccacgggctgcggaaaaaagccacactcccggcggagtcgagcatcaatcggcaatgaatgccgcgtcgcgcagccgccattaaactttcagccacctggtccgccatgccgccgggctgccagatataaaacaccatctcaatattatggcgcgcgagctggatgtcgcggattaacgcctgcatcacatcatcactctcggtcatcagttgtagctgattccctttgaccccagcgatcccctgacgacgctcgcaaagcttgaataatggcgcagcgacactgctattttcttcggcgaagatatgcttacaggctttaaggtcgttaagccattttgcggtggaaggccacatcgctctggcgcgctcagcgcggcgtttgcctaaatggagctcgccaacggcaagataggcaataattccgactaacggcagaatgtaaataatcaacagccaggccatcgcggagggaactgcgcgtcgtttcattagaatgcgtaaagttacgcctgcaatgagcaaccagtatcccagaatggccaaccaactcaccaacgtataaacggttgtcatagattagaaatccttttgaaagcgcattgttatgagtttacgcatatggattcatctggcaaataaaaacgcgggaaaagcactggtcagcgtcgggggtgggggtataatgaccattctgttattgcatagagtagttaacatgaagcggagtagaacggaagtggggcactggcgcatgcagcgtcaggctagccgacgtaaatcgcgttggcttgaggggcaatcgcgccgaaatatgcgtatccacagcatcaggaagtgcattctaaacaaacagcgtaactcgttattgtttgcgatctacaatatctaaatgtactgggcaccattgcggtgcccaataagtttactcttccgtctttaaactttatttttgcgcgctttctttactgtcagctttcgtttctagttcatcgttatcgctgaaaataccatgaccactgttcaacaacatactaacgagcatatcattattaatctcttcaccatttaaaactcgcgccagaatttcgctgccaaacagttgcggactgagaatgatatccggatgtaccatcttaatcttattcaggtttttgctatcactgacggcgagaactgttttgacatcactgctcatatcttttgcgctgagtacaacaaacgcgttatctgcatcgttatcactcagcgccagaatggcccggcaacgatcgattcccgctttctttaatacagaactgtcattactgtcaccggggataacatcagcattatcgcctaagcgttgctcaagttgcttgatatcatcttcaggcaagttgctgataaccgttacgttttgtccgcgttgattcagttgcaggatcgtattgatggcgagaatgctatgtccgcaaacaataaaatgatctttacgatgcattgtatgattgtttccttttacaagtttgttgaatcccccgcggataagcggaccaaaaatactggtcatagatgtggcaaaaacggtaatgccggaaataatgacgctaatagtgaacaatcgtgcactttcagaaacagggacaatatcgccatagccgacggtactcatggtttctatgctaaaatagaacgcggtcatcaaactttctattcgcggattaaaaccttcgcttaaataaagcgcaccgtaggtactgtaaaacagtaatgtcgtgaaactaataaatgcaaaaattgtcccggctgcggcgctactgtgggagaagtctttgcgcagtatcagcaaaaacaccagcgtaaaaatgcaaaatccaatactaaatttcagccagggataaaaatgcagggtgtaaattagcgctatcaacaacaaaatgatactgattgcccatgcgagctttgcccggaacagtaagccaatggagttcaggacaagaaagacgccgagcataaagagtggggcgtttgccagcaaggagagatccaactcactaaatgctttgatatggaaaatatcaagcaaattgacgctcataccatagattgttttaaaaataagcaatccatttaaaaagacggccagcgcgagaatgtcgtgccgaagggtcacccataaatttgttgctgtttgtttgaatgtagcccagtgactcactgatacctctgtaaccacaattttgtttaattatcttagcgtgcacattttctgaacatacatgcagcgcgtgaatgtgttaaacaatagtagatgactttatccgcagtaatcaaaggatttgagcgagcaactgtacctcaggaaaggtcatttttcctgaatatgctcacatcatataaagaaatacagataaagttattatctgcttgtggtggtgaatgcactgaccggctataaggaaaggccaaacaagaacacggttgcaaaaaccgtgcccttaaatattgaatctctattcagaacactttcttaaatggtttcacactaacgtgttcatagactcctgccgctacgtacgggtcagcatcggcccaggcctgagctgcttccaggctttcaaattcagcaataacggtactgccagtaaatcccgcagcccctggatcgttactgtctaccgctggcattggaccagctgtcaacaaacgaccttcatcatgcagtaactgtaaacgtgctaaatgtgccggacgaacggaaaggcgtttttcgaggctatcagctttgtcttgagcgtaaataacatacaacacgggcacaactccttgttcgggaaagttgtaaagtacgttatttgaaagggcgaagatctgcaacggaaagatgatgtctttgttaaggccatgcataaagtaagggtaattacgccaaaaatgacattttcactgatcctgatcgtcttgccttattgaatatgattgctatttgcatttaaaatcgagacctggtttttctactgaaatgattatgacttcaatgacccttgatttacctcgccgcttcccctggccgacgttacttagcgtctgcattcatggtgctgttgtggcgggtctgctctataccagcgtacatcaggttattgaactacctgcgcctgcgcagccgatttctgtcacgatggttacgcctgctgatctcgaaccgccacaagccgttcagccgccaccggagccggtggtagagccagaaccggaacctgagccgatccccgaaccgccaaaagaagcaccggtggtcattgaaaagccgaagccgaaacctaagccaaaaccgaagccggtgaaaaaggtacaggagcagccaaaacgcgatgtcaaacccgtagagagccgtccggcaagtccgtttgaaaatacggcaccggcacgcctgacaagtagtacagcaacggctgcaaccagcaagccggttaccagtgtggctagtggaccacgcgcattaagccgtaatcagccgcagtatccggcacgagcacaggcattgcgcattgaagggcaggttaaagttaaatttgacgttacgccggatggtcgcgtggataacgtacaaatcctcagtgccaagcctgcgaacatgtttgagcgtgaggtgaaaaatgcgatgcgcagatggcgttatgagccgggtaagccaggcagtgggattgtggtgaatatcctgtttaaaattaacggcaccaccgaaattcagtaagcagaaagtcaaaagcctccgaccggaggcttttgactattactcaacaggtaaggcgcgaggttttccttcaggatcaaccgcgacatacttaaataatgcttctgtcgctttatagcgttgcccaattggttcagacgctacttttttcacccacacttcaatattaatgctgacgcttgtcgtccctttctggacacagcgtgcatagcagcacaccacatcgccgaccgcaaccggccgtaagaaagtcattccttcaacccgcacagtcactacgcgaccgtgggcaatttcttttgccagaatagcgccgccaatatccatttgactcattaaccaaccaccaaagatgtcaccattggcattggtatcggcgggcatggctaaagtacgtaaaacaagatcgccctgagggacgttatgtgttgtagacatggtaaaaccgacttaaaaggaaaatcacaggcgcgatgctactatgattttcctgaggagaacagaggagatacagcgccagccccgaaggactggcagtctggttaggatttatcttcctgcggcatgtggcggtagatatagataccgcttaacaatgtgaagattaaggtaagggcggtcaggccaaagactttaaagttgacccaaatattttgcggcagccagaatgcgatgtagatgtttgccagaccgcaaaggataaagaaaacagcccaggccagattcagcttgctccataccggttgcggcagcgtgagttctttacccagcatccgctgaattagcggctttttcatcacccattggctgactaacagggctcccgcaaatagagcataaatgacagtaaccttccatttaataaactcatcattgtggaagaacagcgtcaagccaccgaagacgaccaccagaacaaaagtgatcagggccatcttctcaaccttacgaaagcgaacccagctatagataagcacaatcgccgtggcgacgatcagcgccgcagtagccgcatagatgtcataaatcttgtaaaacgcgaaaaagacaaccagcggtaaaaaatcaagaaactgcttcattttacgattccgtaatcaaatgcttaaggttattggcgaatcaacatatacaggcggaacagatagatgagcaatatggcactaatcaggttgctcaaggtgttcgccagtacggcaccaatttccggggttaatgcggcaaaagaagaggcaaaaagcagcaacagtgtttttgccagcaaccagctcagtactgcgggtgccaccagacgcatattcgcccaagtcagccgcatactgctacgcatgctggcaaaaacgcccattttgtcctgtaccaacatcaccggtgccagggccagtaaaatggccatgataattcccggaacgaccaccagcatgatgccaatctgtactaaaagggtagtcagaaaaatcagaataaataactttggcaatatcggcgcactggcaccaatagctcgcagcgcactgactctctgacccgcagacaccagctggataattaatattacgcctccggcgagaatggcgttaccgattaatccactaaaagtggacgccgcactagcctgcagcaaaatttgttgctgttccggactcatattctgaaccaggtcgaacaacccactactgccgctaacgggcacgcagtcattgagctgcgcaagctgtgcatcactgggactgaaagcatgccctaacaccactgtgataaacgcacatagcaagcttaccaacagaatggtcataaattgattacggaagaaatttccggtgtcacggtatacggactgcgccgtgatagacatgcactctccttgagttttatgcaggtgttaattagcgggcaattgtaccctggttaagcctcgggtggcagcatcaggtcttgtatggaaaagcatatctttgtaaagcggaggtaattgctggccttcaggcatgggcaaatcgcggcaagtggcgaccgagttaatatttgcgtagcgaaaatatttaaaaattgatttaaatcacattaaccaggattctcaatgcaacttctaaattaatccagatcaataaagggtgaattatcatatgtaatgtgatctatgtaggatcatttgttactccaatgtaggtatattcgtcacgtttttataaccataacgacggagcggatatgaaaaagttaacagtggcggctttggcagtaacaactcttctctctggcagtgcctttgcgcatgaagcaggcgaattttttatgcgtgcaggttctgcaaccgtacgtccaacagaaggtgctggtggtacgttaggaagtctgggtggattcagcgtgaccaataacacgcaactgggccttacgtttacttatatggcgaccgacaacattggtgtggaattactggcagcgacgccgttccgccataaaatcggcacccgggcgaccggcgatattgcaaccgttcatcatctgccaccaacactgatggcgcagtggtattttggtgatgccagcagcaaattccgtccttacgttggggcaggtattaactacaccaccttctttgataatggatttaacgatcatggcaaagaggcagggctttccgatctcagtctgaaagattcctggggagctgccgggcaggtgggggttgattatctgattaaccgtgactggttggttaacatgagtgtgtggtacatggatatcgataccaccgccaattataagctgggcggtgcatagcaacacgatagcgtacgcctcgatccgtgggtgtttatgttcagtgcaggatatcgtttttaattccgcacaaaaacgaccccgtaatatacggggtcaataaggacatggtataaagggtattatttcttcgcttctacgccatcagtttcagagcgaattaaaaatttctcagttgtttgcggaatattctgaatcagccagtcggccatttgcttttcctcatttaaaatcgcttcgatggttggaatactagctgtatcaccggcattttttgctgctgctaatagactggtgtaacaggcgatttcaaattgctcgaagacatatccgctaatagagcctttgactatttcatcagaagggaatataccaccgatactctgcccaagcgcagccattttactcatggaatctttaatgacactacgactaatgtcattacgatcaagaatagtttccagttgaacaatctggtttttggtttcactaagatgttgttcaatacgagcgcgtagttcaggataattatctatacggctggccatggattcaagcatagattcggcttgcttttccattgcgtgggcgtcacgtaaccagtcatgataatgttcaatacgattcatgaaaatgtcctctttataaaatgactaaaagttaaaattcatatttcaggctttattttcggctttcttatttacgttattaatggccagatcagtcagtttgatgtcggtggccttttcttcttccagggtttctttcagaagcttcgctgctttacggtaacctaattgttcagccagcgtcgctaatgtcccgtaactggcaatctcataatgctcgactttctgtgctgcggcaatcagtgcggcatcacgcacttcgtttttctcggtactttcgatgacctcattagcttcttcaataagaccttccattgccacacatttcatgcgcttaattttcaggttgctttcggactccacaacttgatcaatacgttcaatctgtccatgagtttcctcgaggtgcgcatgaaaagcctgacttaatttttcattacttgttgctcttgcgagttttgccagtgcccgggttaattgtttttctgcgctgtaggtatcactaagcaggtgaataaatacatcttcaatggtcttcatattcatatttttctccagtgaaatcactgcgagccatacggcccgcagatgcaattatctttatcagctgatattaataattaacggtgaatcaggatttgccacttttattaccaccgctttgttgaccgccttttttacccgcttcagatgcgcgttgcggatcatttttaaaattaccgccgctatgctgaccgcctttacggcctgcgtcggatgccttctcacggtcttcggcgaaatttccactaccaccacgatgttcggccatgttatttctcccgttgcgttgcattgtttcattaatatgagtgttgtgtgtcgacactcattaaaattagtcgctaatgagaattagtcaaattaagcgcaacgagaagatagagggaaaatatattttgaggaacattctggatatattaacaattacctgaggaataagtgacttagagaaaattattgattttactggtgttatgttgcgggattaatttgtttgattatattactgttgggcggaaaaatgacgtaagttgacgttcgaccggggtaagcgaaacggtaaaaagataaatattaaatgaatttaggatttttccggcttcattaaagaaagttaaaatgccgccagcggaactggcggctgtgggattaactgcgcgtcgccgctttcatcggttgtacaaaaactttcagtgccgccagcattttctctggctcattaatatgttgctcgatgattttaacaatggcgctaccagaaatcgcgcccgcagctcctgcatcaatcgctgcttttacctgatccggggcggaaataccaaatccctgcaatggaggtgcagcgttgtactctttcagcttcgcaaccagatgattgaggggtaacgcggcgcggttttctgcgccggtcacgcctgctcgactcagcaaataggtgtaaccacgaccgtaagaggctatctggcgcagcaggtcgtcatcggcatttggcgggcagatgaagataggtgcgacattatgacgcaacgcggcctggcggaagggcgcggactcttcaactggcacatcggcaaccagcacgctatcgacgccgactttttcgcactgggcataaaactcatcaatgcctttgttaaacaccagattggcatacatcaacaggccaatgggaatggtcgggtgtttctggcgaatcagtgccagcatttcaaaacattgtgccggagtcacacctgccgcaaaggcgcgcagagtggcgttttgaatcgtcgggccatccgccagtgggtcggagaaggggatacctaactccagcgcgtcagcaccggcttcaattagcgtatcgataattttcaaactctgctcaatgcccggatcaccgagcgtgacgaaaggaacgaatgcgccttctttgcgctccttcaactgggcaaacagagattcgtagcgttccatcagatttcccctcgtgctttcaaaatatcgtgaacggtgaagatgtctttatcgccgcgaccggaaaggttaaccaccagtagctgctctttatccgggttttcgcgcatcattttcaacgcatgggccagggcgtgggaggattccagcgccgggatgatcccttcgtgcaggcacagcgttttgaaggcttcaagggcttcatcatcggtaatagacacgtaatcagcgcgtccagtgctgttaagatacgcgtgttgtgggccgacagacgggaaatccagtccggcggagatggagtaagattcttcaatctgcccgtcttcggtttgcatcatcggcgctttcataccgaaatagatacccacgcgaccatgttttagcggtgcgccgtgctcgccagtttcgataccgtgaccacctggctccacaccaatcaggccgacgttggtttcattgatgaaatcagcaaacatgccgatggcattgctaccgccgccaacacaggcgataacggcatccggcaggcgaccttctctttccagaatctgcgctttggtttcttcgccaatcatccgctgaaactcacgcacaatggtcggataaggatgcgggccagctgcggtgcccagcatatagtgcgcggtttcgtaactaccggaccagtcgcgcagcgcctcgttacaggcatctttcagcgtcgcggaaccgctatgcaccgggatcacttccgcacccattaagcgcatacgaaaaacgttagggctctggcgttcaacgtctttggcacccatataaatacggcatttcaggccgagcagggcgctggcaagggcgctcgccacgccatgctgaccggcaccggtttcggcgatgatttcggttttacccatccgcttcgccagcaacgcctgccccagcacctggttagttttatgcgcgccgccgtgcagcaaatcttcacgcttgagatacagcgtggtgttcgtcccggctgtaatgttctggcatttggtcagcgcggttggacgcccggcatagtttttcagcaggtcgttgaactgagcctgaaattcaggatctttttgcgcactgacaaaagcttcttccagctggcgcagagcaggcatcaggatttgtggcacgtacatgccgccaaactcaccaaaataggggttaagtaatgttgtcattgttcctttccttaatatgcgcgcagcgtctggaaaacgctggccaaaagacgtgcgtctttgatgcccggttggctctctacagcagaattaaaatcaagtccggcgcagccggtttgtgccgcttccacgcagttatctgcgcctaagccccccgccagcagaacgttgccaaggctttgaccatttaatagactccagtcaaaacgttgcccgcttccaccctggccgttgtctaaaacatatttatcaacgtgctgaaactcgcgggcgggcagggtttcaccgacgcttaatgctttccagatggcaacatgtgctggcagagcttcacgcagcgtatcgatatacagctgttcttcattaccatgcagttgcactgccgccaggcttaacaccttagctttgtccaccacatcggcaatatcgtgattgcggaacacgccaacatactgcaacggtgccgcagccatcacttcctgcgcctgttcaacgttgacgcaacgcggacttgtcgcaacaaaaatcaacccaccgtaaatcgcgcccgcgtcataagctgctttagcatcttgcccacgcgtcaggccacatactttattctcacccagcaacacccggcgcacggcggcgtgcaaatcgtcatgggccatcaacgcgctaccaatcagaaaaccgttagcgaagtggcttaactcgcgcacctgagcgtaagtattgatgccggattcgctgattaccgtcacgttgtgccccagtttcggcgcaagctcgcgggtacggttgagatcaatgctcaaatcacgcagatcgcggttgttgatgccaacgacctttgctcccaatgcaatggcgcgctcctgttcctcttcattactgacttcggtcagcacccccatctccagactgtgagcgacggcggcaagctggcgatattggtcgtcatccagtacactaagcattaataagcaggcatcggcctggtaatagcgcgccagatagatctggtaagggtcgataatgaagtctttacataaaatcggctgcggggcgatttggctgacgatggggaggaaattaaagctcccctgaaaatatttctcatcagtcagcacgctaattgcgctagcgtaatgtttataaatggcggcaatgcgtgctggatcgaaatcatcacggatcacgcctttactcgggctcgctttcttgcactccagaataaacgccgtgcgcgcaccctgtagcgcatcataaaaatgtcgcgtgctcggctgaacctcattctgaaaactggccagcggttgctgctgtttgcgggcttctacccaaatcgccttgtctgcgacgattttcgctaaaacggtttgcatcatttaccctcgtgccgccagtgcggtgactctgtcgtaagcggaaccactgcgcagtacctcaagaacggtttgcgcattggcttgcagatcttcatggccatgcaggcgcattaacatggcgacgttcgcagcgacggctgcttcatgggcggcgtcgcctttaccttgtaacaaacgtgttaaaatgtcacggttttcttccggtgttccgcctgccagttgctcctggtggtagggtgtcaggccaaagtcttctgcggtgagctgatagcttttaatttcgccgtcatgcagttcggcaacgattgtcggcgcgtgtaaactaacttcatccatcccgccgctgtgcaccaccgccgcgcgttgataccccagcacgcgcaaggtttcggcaatcggcagcaccagttccggactataaacaccaattaacgccagcggcggatgcgccgggttaatcaatggccccagcacattgaacagggtgcgggttttcagttgctggcgaaccggcatcgcgtggcggaatccggtgtgatacttcggcgcaaagaggaaacatacacctaactcatccagcgcctggcggcttttatcggcgttcatatcaagattaataccgaacgccgccagcagatcggagctaccagatttactggagacgctacggttgccgtgtttcgccactttcagcccacaggccgcggcgacaaacgcactggcggtagaaatattgatactgttgctgccgtcaccgccagtaccgacgatatcagcaaacagataatccgggcgcgggaacggcgctgcgttttccagtagcgcggttgctgccccggcgatctcgttcgggtgctcaccgcgaattttcatgctcaccagcgccgccgccagttgttccggcttcagctcgccacgcaccaccgcactaaacagctggtggctttcttgttggctaagcgtctgcgcctgatacagtttttccagaatcggttgcagcgtgttggctggctctagtttctgctgcgcccaggccagcgtttgttccagcaggcgagcgccctgggtggtgagaatggattccggatggaactggaatccacaaacgcgatccgcatcgtgacgtactgccatcaccatgccattaaaatgggcgttgatggttaaaccggccggaatgttactgccaaccaggctgtgataacgcgccaccggcagcgggtttgttaatccggcaaacatcgcctgaccgtcatgttcaatgctggaggctttaccgtggagaatttcgcccgcctgaccgacatagcccccgtaagcttcgacaatcgcctgatgtccgaggcaaatgccaataatgggcagcttgccacgcaagcgggtgaggagttccggcatacaaccggcttcgctcggcacaccggggccaggagaaagcatcagcaccggattgctcatggtcgccaggcgttcaattaaggtttgcgccggaatatggttgcggtaaatcaccacgttatgcccattgctgcgcaactgatctgccaggttgtacgtaaaagagtcgatattatcgagcagcagaatgtcagccatcagaaagtctcctgtgcatgatgcgcggtggcaatagcgcgcagtacagcgcgggctttgttacgggtttcgtcggcttcgctctgcggaacagaatcaaggactacaccagcacccgcttgcacggtggcgataccgttttccaccagcgcgctgcggatcacaatgcaggtgtcgagatcgccatgcgcggtgaaataacctaccgcgccgccgtagctgccgcggcgacgaccttccgcctcggcaattaactgcatagcgcgtactttcggcgcaccgcttaacgtccccatattcatacaggcgcgataagcgtgcagggcgtcaagatcgtgacgcagttcgccgactacgcgagagacgaggtgcatcacataggaataacggtcaactttggtgagatcggcgacgtagcggctgccgggggtgcaaatgcgtgccagatcattacgggcgagatcaaccagcatcagatgttcagacagctctttatgatcggtacgcatttccagttcaatacggctgtcgagatctctgtccagactaccatcggcgcgacgaccgcgtgggcgtgttccggcaatcgggtagatctcaatctggcggctggtggcatcatacttgaggctgctttccgggctcgcgccaaatagggtgaaatcattatcctgcataaaaaacatgtacgggctgggattactctttttcagcacgtaataggccgccagcggactcgggcagggcagagagaaacggcgagatggcaccacctggaaaatttctccagcgcgaatcgctttttgcaacaaacgcactacgccaccgaactcttcatcgctctgattacattcacaacgcatatgcggcacggaaaccactggcagcggcggcgcggcttcggtcagttgctgacgtagttcgttcaggcgagcagtgagacgttgtttttcttcttcattcggagcaaacaggctggcctgaatacgggtgctttttttctgatggtcaatcaccatcagcgtttcagcgagataaaaacagaaatcagggcagttattttccgcactcagttgcggtaaatcttcaaatcccgccacaaggtcataagagaacaggccgccgaagaacatggcttctcgttcttccttcggtacattcaacagattctgcaataaacggaaagcgtcaaaaacgctaagggagcataagcgggcgtcttcatccagcagtggactgacaggggggaagcgcagcacacggcagtttggactttgttcactttccacacccgcaggcagggcgttatccagtagtgccaggagggcttcgccgttgccggaaagtgcctggattgtgacagtgtcacctaaagctgtaatgcgcagcgcactgtctaccagcagcaggctttttaaatcatctttgctgtcgatatctgcggattccagcagcagcgttgccggacgatccccacacaactggtgaaaaagcgcggtgggattgtcgcgataagcgccttcgcaggttagcagttcgagagtcggtttttgtgtttgcattgttattctctaattttgttcaaaaaaaagcccgctcattaggcgggctgggtatctgattgctttacgcatggtgaatacactgcccgtttcaggaagtgcgccaccaacctttcagtacgaaaattgctttcattgtcgataccctttttacgtgaacttgcgtactagttaactagttcgatgattaattgtcaacagctcatttcagaatatttgccagaaccgttatgatgtcggcgcaaaaaacattatccagaacgggagtgcgccttgagcgacacgaattatgcagtgatttacgacctgcacagccataccacagcttccgatggctgcctgacgccagaagcattggtgcaccgtgcagtcgagatgcgcgtcggcaccctggcgatcaccgaccatgacaccacagctgcaatcgcgccagcaagagaggaaattagtcgtagcggactggcgttgaatcttattcccggcgtggaaatttccacggtctgggaaaatcatgaaattcatattgtcgggctgaatattgatattactcatccgctaatgtgtgagttcctcgcgcagcagacagaacggcgcaatcagcgggcgcagctgattgccgaaagacttgaaaaagcgcaaatacctggggcgctggaaggcgcacaacgactggcgcagggcggcgcagtgacgcgcggtcattttgcgcgtttccttgttgagtgcggcaaagccagtagtatggcggatgtctttaaaaagtatctggcgcgcgggaaaaccggatacgttccgccacagtggtgtacaatagaacaagctattgatgtcattcatcattctggcggtaaggcggtgctagctcatcctgggcggtacaatcttagtgctaaatggctgaaaagattggttgcgcattttgccgaacaccacggtgacgcgatggaagtcgcgcagtgccagcaaagccccaatgaacgtacccagctggcggcccttgcgcgtcagcatcatttatgggcaagtcaaggatctgattttcatcagccatgcccgtggatcgaactgggtcgtaaactctggctgcccgcaggcgttgaaggcgtctggcagctatgggaacagccgcagaacaccacagagagggaattatgagccagtttttttatattcatcctgataacccacagcaacgtctgatcaaccaggcggtggagatcgtgcgtaaaggcggggtgattgtttatccaactgattccggctatgcgctcggctgtaaaattgaagataaaaacgcgatggagcgtatttgtcgtattcgccagctgccggacggtcacaactttaccctgatgtgtcgcgatctttctgaactcagcacctatagttttgttgataacgttgcgtttcgtttaatgaaaaacaacacgccgggcaactataccttcatcctgaaggggacgaaggaagtgccacgccgtctgttgcaggaaaaacgcaaaaccatcggtatgcgtgtgccttctaaccctatcgctcaggcgttacttgaagcattgggcgaaccgatgctttccactagcctaatgctgccaggcagcgaatttaccgaaagcgacccggaagaaattaaagatcgtctggaaaaacaggtagatttgattattcacggcggctatctcgggcagaaaccgacaacggttattgatcttaccgatgatacgccggtcgtggtgcgtgaaggcgtaggtgatgtgaagcctttcttataacaaattgcgttccacggatggaagactatggcagggaagtttcgctgcattttgctgttgatagcagggctgtttgtaagttctctaagttatgcagaaaacacggagatcccttcttatgaagaagggatcagcctctttgatgttgaagccactctgcaaccagatggggtgctcgacatcaaagaaaatattcattttcaggcgcgaaatcagcagattaagcacggcttttatcgtgatttaccacgactatggatgcagcctgatggggacgctgcactgctgaactatcatattgttggcgtcacccgtgatggtattcctgaaccctggcatcttgactggcatatcgggttaatgagtattgtcgtgggcgataaacaacgtttcttgcctcaaggcgactatcattatcaaattcattatcaggttaaaaatgctttcctgcgtgagggggattctgatctgctaatctggaacgtgaccggtaaccactggccgtttgaaatttataagacccgtttttctctccagttctctaatattgcgggtaatccatttagcgaaatcgatctttttaccggagaagagggcgacacatatcgtaatggccgcatccttgaggacggaagaattgaatcccgcgatccgttttatcgtgaagatttcacggtcctctaccgctggcctcacgctttacttagcaatgccagcgctccgcaaacgacgaatattttcagccatcttcttttaccctccacgagtagcttgttaatttggtttccgtgtctgttcctggtttgtggatggttatatctctggaagcgcaggccgcaatttacgccggtagatgtgattgaaaccgatgtcattccgccagattacacgcccggcatgttacgtctcgatgcgaagctagtttacgacgataaaggtttttgtgccgatatcgtaaatctgattgtgaaaggaaaaattcatctggaagatcagtctgacaagaaccagcaaatcctgattcgtgttaatgaaggcgcgaccagaaataatgcggtattactgcccgcagagcagttattactggaagcgttatttcgtaaaggcgataaggtcgttcttacggggagacgcaacagagtcttacgcagggcatttttacggatgcagaaattttatctgccgcgtaaaaagtctagcttttaccggtctgatacttttttgcaatggggtggactggcaatattggcggtcattctttacggtaacttgagtcctgtaggctgggcaggaatgagtctggtgggcgatatgtttattatgatctgctggattattccttttttattttgttcccttgagcttttgtttgcccgcgatgatgacaagccttgcgttaatcgtgtaatcatcactttgtttttaccactgatttgtagtggcgtggccttctattctctctacatcaatgtcggagatgtattcttttactggtatatgccagcgggttattttaccgctgtttgcctgaccggttatctcactggcatggggtatatttttctgccaaagtttacccaaactggacagcaacgttatgcccacggtgaagctatcgttaactatcttgcgcgtaaagaggcagcaacacacagtggacgtcggcggaaaggggaaacacggaaactggattacgcgttgctaggttgggctataagcgcaaatttggggagggaatgggcgttacgcattgcccctagcctttctagcgcgattcgcgctccagagattgcccgtaacggcgttttattcagtttacagacgcacctaagttgcggggccaataccagtttgttggggcgaagttattccggtggtggtgctggcggcggcgcgggtggcggaggcggtggtggctggtaattaagctgatgttaatcgaaacaagctttaaccataaagatagtgtagtatgttgcgcctcaaagccaggccgataaacgtcgagtcgtttacttaaggcctgaagagttcaaacagactttactatcagtgagtcagatgtaagttctgactcactgttgcacaaaagcatatcagacgcctgggaaggcgacaccaaaaggaagctctatgagcgaaaagctacagaaagtgctggcgcgtgccggccacggttctcgccgtgaaatcgaatctattattgaagccggtcgtgtgagtgttgatggcaaaattgctaaactcggcgatcgtgttgaagttacccctggattgaaaatccgtatcgatggtcacctgattagcgtacgtgagtccgctgaacaaatttgtcgcgttctggcctattacaaaccggaaggtgagttgtgtacccgtaacgatccggaaggacgtccaacggtgtttgaccgtctgccaaaactgcgtggcgcacgctggattgccgtgggtcgcttggacgttaatacctgtggtctgctgctgttcaccaccgatggtgaactggcaaaccgtttaatgcacccaagccgtgaagttgaacgtgaatatgccgtgcgtgtatttggtcaggttgacgacgcgaaactgcgtgatttgagtcgtggcgtgcagttggaagatggtccggcagcttttaaaaccatcaagttcagcggcggcgaagggatcaaccagtggtacaacgtgactctgaccgaaggccgtaaccgtgaagttcgtcgtctgtgggaagcggttggtgtgcaggtgagccgcctgatccgtgttcgttacggtgatatcccactgccaaaaggtctgccacgcggtggctggacggagctggacctcgcccagactaactatctgcgcgaactggtggagctaccgccagaaaccagctctaaagtcgctgtagaaaaagaccgtcgtcgcatgaaggcgaatcagattcgtcgtgcggtgaaacgtcacagtcaggtgagcggcggtcgtcgttctggcggacgtaataataacggttaatcaaagtatgccggacgtcatatccggcatttttacagattaataatcgatccctatctgcgcttttacaccggcatcaaacgcatgtttgacggggcgtaattcacttaccgtatctgccagttcaagaatatcccgatgacaaccacgacccgtgataatcaccgtctgttgatgtggacgttcatttaacgcctgcaccacttcttccagtggcaaatagtcatacgccaccatatacgtcagttcatcaagcaaaaccatatccagactggaatcagcaagcatccgctttgcatgttgccagacttcgcggcaggcggcggtatcagactcgcggttttgtgtatcccaggtaaagcccgttgccatcacctgaaactcaacgccatgtggctccagcagattgcgttcgccattaggccaggtgcctttaataaactgcacgacgcctactttttttccgtgaccaactgcgcgtgttgccgtaccaaatgccgcggtggttttgccttttccattgccggtaaagacgatgataataccgcgttcatcctgggcctgggccacacgagcatctactttttctttcactcgctgctgacgctgttggtagcgttcatcactcattgggaaattcctggtttacggcccggttgggcgtcaaaggtcatgccggttttacggcggctgtcatcgcccatcagccagaggtagagcggcatgatatcagcgggtgttttaagtttctgtggatcttcggtcgggaaggcgctggcacgcattgcggtgcgcgtaccgcctgggttaatgcagttgacacgcaggcgctgctgatattcatcggccagtacctgcatcatcccttcggtggcaaatttgctcgctgcatatgcaccccagttggctcgtccctgacgtccaacgctactactagtaaagaccagactaccggcgtcgcttttgagtaataaaggaagcagtgcctgggtgagcataaaggtggcattaacgttgacctgcatgacgtcctgccagacctgcggattttgttcgctcattgggcaaacatcgccgagcaatccggcattatgcaaaacaccatccagacgcggataattaacggcaatgcgctgtgccagttgttggcaattttcggacgtgcaggtcagcaaatcgagaataaaccactgtggctgacgcccagtttcttcgtttatgtggctggctacctgacgtaatttttcttcattacggcccaacagaatcactgtcgcaccatagcgtgcatacgtcatcgcggcttcacgaccaataccatcgctggctcccgtcaccaggataatgcgatcattgagtaaatcttgttttggctggtaatgcatggctactcctcaacgacgttgtctgtcgcgctgccagtgtactttatgactttggggctttatgcctgaaacagaagggcatttcaatcagcctggggcgataacaccgcaaaatggatactttgtcatactttcgctgcaataacatctctgcgagacggcttaacatgcctgttgtaaactgtgagccaaagcgttgtttaaccaaggtggggactcgtggaattgttgtctgaatatggtttgtttttggcgaaaatcgttaccgttgtgctagcgattgcggcgattgccgccattattgtcaatgttgctcaacgtaataaacgccagcgtggcgagttacgggtcaacaatctcagcgaacagtataaggagatgaaagaagaactggccgcggcgctgatggacagtcatcagcaaaaacagtggcacaaagcgcagaagaaaaagcataagcaagaagcgaaagcagcaaaagcgaaagccaaactgggcgaggtggcaactgacagtaaaccccgcgtctgggtgctggattttaaaggcagcatggacgcccatgaagtgaacagcctacgtgaagagataacggctgtactcgcagcattcaaaccgcaggatcaggttgtgctccgtctggaaagccctggtggcatggtgcatggttacgggctggcggctagccaactgcagcgtctgcgcgataaaaacattcctttaactgttacggtagacaaagtcgctgccagcggcggttacatgatggcctgtgtggcggacaaaattgtttccgcaccgtttgctattgtgggttccattggcgtggtggcgcaaatgcccaactttaaccgcttcctgaaaagcaaagatattgatatcgaactgcacactgccgggcagtataagcgcacgctgacgttgctgggtgaaaataccgaagaagggcgggagaaattccgcgaagagttgaacgaaacgcatcagttgtttaaagattttgtgaagcgtatgcgtccttctctggatattgaacaggtggcaacgggtgaacactggtacggacaacaggcggtagagaaaggcctggttgatgaaatcaacaccagtgatgaagttattcttagcctgatggaaggccgtgaagtggtcaatgtacgctatatgcagcgtaaacgactcattgaccgattcaccggcagcgcggcagagagcgccgatcgattgttgctacgctggtggcagcggggtcaaaagccattgatgtaaaagacaaacgcgaggctaagacctcgcgttttgctttaatcaaccagatgatatttttcactaagcacatgggccaggtgtttgaacatattaaacaccgcggtgcttttggctgttggcaatccttgttcatctaaaaagtagtcgccggtaaataccagcacgccattacgctgcgtgacgccggtggcttcaatccctgcgagcgtatcctcatgctcacgaatgattttgttggcctctttcaacagcgtttcgcggtcgatgggttgtgtctctttgttcattatttactccttaaacaaggacattagtctacgccaggcatggcttgcagacaaatataccacgctggtggcaagagcgccttactggcaactttggattttgcatgctaataaagttgcgtatcggattttatcaggtacagtgtgacgctttcgtcaatctggcaatagatttgcttgacattcgaccaaaattccgtcgtgctatagcgcctgtaggccaagacctgttaactcagtcacctgaattttcgtgaacagagtcacgacaaggggttgatatccgcagagagcgagtccatatcggtaactcgttgccagtggaaggtttatcaacgtgcgacgcattcctggaagaatcaaattaggtaaggtgaatatgggtaaagctcttgtcatcgttgagtccccggcaaaagccaaaacgatcaacaagtatctgggtagtgactacgtggtgaaatccagcgtcggtcacatccgcgatttgccgaccagtggcagtgctgccaaaaagagtgccgactctacctccaccaagacggctaaaaagcctaaaaaggatgaacgtggcgctctcgtcaaccgtatgggggttgacccgtggcacaattgggaggcgcactatgaagtgttgcctggtaaagagaaggtcgtctctgaactgaaacaactggctgaaaaagccgaccacatctatctcgcaaccgaccttgaccgcgaaggggaagccattgcatggcacctgcgggaagtgattgggggtgatgatgcgcgctatagccgagtggtgtttaacgaaattactaaaaacgcgatccgccaggcatttaacaaaccgggtgagctgaatattgatcgtgttaatgcccagcaggcgcgtcgctttatggaccgcgtggtggggtatatggttagcccgctgctatggaaaaagatcgctcgtggcctgtctgccggtcgtgtgcagagcgtggcggttcgcctggtggtcgagcgtgagcgtgaaattaaagcgttcgtgccggaagagttctgggaagtcgatgccagcacgaccacgccatctggtgaagcgttggcgttacaggtgactcatcagaacgacaaaccgttccgtccggtcaacaaagaacaaactcaggctgcggtaagtctgctggaaaaagcgcgctacagcgtgctggaacgtgaagacaaaccgacaaccagtaaacctggcgctccttttattacctctacgctgcaacaagctgccagcacccgtcttggatttggcgtgaaaaaaaccatgatgatggcgcagcgtttgtatgaagcaggctatatcacttacatgcgtaccgactccactaacctgagtcaggacgcggtaaatatggttcgcggttatatcagcgataattttggtaagaaatatctgccggaaagtccgaatcagtacgccagcaaagaaaacagtcaggaagcgcacgaagcgattcgtccttctgacgtcaatgtgatggcggaaagcctgaaggatatggaagcagatgcgcagaaactgtaccagttaatctggcgtcagttcgttgcctgccagatgaccccagcgaaatatgactccacgacgctgaccgttggtgcgggcgatttccgcctgaaagcacgcggtcgtattttgcgttttgatggctggacaaaagtgatgcctgcgttgcgtaaaggcgatgaagatcgcatcttaccagcagttaataaaggcgatgctctgacgctcgttgaacttacaccagcccagcactttaccaagccgccagcccgtttcagtgaagcaagcctggttgaagagctggaaaaacgcggtatcggtcgtccgtctacctatgcgagcatcattagcaccattcaggatcgtggctacgtgcgagtagaaaatcgtcgtttctatgcggaaaaaatgggcgaaatcgtcaccgatcgccttgaagaaaatttccgcgagttaatgaactacgactttaccgcgcagatggaaaacagcctcgaccaggtggcaaatcacgaagcagagtggaaagctgtactggatcacttcttcagcgatttcacccagcagttagataaagctgaaaaagatccggaagagggtggtatgcgcccgaaccagatggttctgaccagcattgactgcccgacttgtggtcgcaaaatggggattcgcacagcgagcaccggggtattccttggctgttctggctatgcgctgccgccgaaagagcgttgcaaaaccaccattaacctggtgccggaaaacgaagtgctgaacgtgctggaaggcgaagatgctgaaaccaacgcgctgcgcgcaaaacgtcgttgcccgaaatgcggcacggcgatggacagctatctcatcgatccgaaacgtaagttgcatgtctgtggtaataacccaacctgcgacggttacgagatcgaagagggcgaattccgcattaaaggttatgacggcccgatcgttgagtgtgaaaaatgtggctctgaaatgcacctgaaaatggggcgtttcggtaaatacatggcctgcaccaacgaagagtgtaaaaacacacgtaagattttacgtaacggcgaagtggcaccaccgaaagaagatccggtgccattacctgagctgccgtgcgaaaaaagtgatgcttatttcgtgctgcgtgacggtgctgccggtgtgttcctggctgccaacactttcccgaaaagccgtgaaacgcgtgcgccactggtggaagagctttatcgcttccgcgaccgtctgccggaaaaactgcgttatctggccgatgcgccacagcaggatccggaaggtaataagaccatggttcgctttagccgtaaaaccaaacagcaatatgtctctagcgaaaaagacggaaaggcgactggctggagtgcattttatgttgatggcaaatgggttgaaggaaaaaataacctttaattctgtcaggtttttataaacaaagggtcgcgaaagcggcccttttttattgcatattattttttcttcacacctatacactaaggctataaatgatatagtggttatagttagcaccttttttattattaaatcgtattagtcacccgccaggtgtgacgaaaaaacgatgttctgatggcgtctaagtggatggtttaacatgaaattacaacaacttcgctatattgttgaggtggtcaatcataacctgaatgtcagtagtacagcggaaggactttacacaagtcaacccgggatcagtaaacaagtcagaatgctggaagacgagctaggcattcaaattttttcccgaagcggcaagcacctgacgcaggtaacgccagcagggcaagaaataattcgtatcgctcgcgaagtcctgagcaaagtcgatgccataaaaagcgttgccggagagcacacctggccggataaaggtagtctgtatatcgccaccacgcatacccaggcacgctacgcattaccaaacgtcatcaaaggctttattgagcgttatcctcgcgtttctttgcatatgcaccagggcagcccgacacaaattgctgatgccgtctctaaaggcaatgctgatttcgctatcgccacagaagcgctgcatctgtatgaagatttagtgatgttaccgtgctaccactggaatcgggctattgtagtcactccggatcacccgctggcaggcaaaaaagccattaccattgaagaactggcgcaatatccgttggtgacatataccttcggctttaccggacgtagtgaactggatactgcctttaatcgcgcagggttaacgccgcgtatcgttttcacggcaacggatgctgacgtcattaaaacttacgtccggttagggctgggggtaggggtcattgccagcatggcggtggatccggtcgccgatcccgaccttgtgcgtgttgatgctcacgatatcttcagccacagtacaaccaaaattggttttcgccgtagtactttcttgcgcagttatatgtatgatttcattcagcgttttgcaccgcatttaacgcgtgatgtcgttgatgcggctgtcgcattgcgctctaatgaagaaattgaggtcatgtttaaagatataaaactgccggaaaaataatttcttgcgttattttcggcaccttttatgtagcgaaggtgccggaatatattctcttttgttacttatttctataccgtgcacaatatttttatccctcatatttatagggtaaattacctgtaaagtagtgtctaattacccgcctcgcaaactccagttttcaaatatctatttcaggtcaaaagattgaattattcactggagacgattcgtaaattcgctggatttttgactaaagtttctttaggatttgtctcatcgtatgattaattacaccaatcgttcaacgtcttgctgataagtgatggcgattatatgaggttagcaatgccttctggaaatcaggaaccccgccgcgatcctgaattaaaacgtaaagcctggctggcggtttttcttggttctgcacttttctgggtggttgtcgcactgctgatttggaaagtgtggggataactatggtcggtcaggagcaactggagtcgtcaccattatgccagcatagtgacaatgaaacagaaacgaaacgggaatgttccgtcgttattccagacgactggcaactaacatcgcagcagcaagcctttatagaactgtttgctgaagatgatcagccgaaacaataattatcatcattcttattacccatttttaatgaattaaagggcttttaatacaccgcagcaataacagcttgagttatctcaacacaaaataataaccgttaagggtgtagcctatgatcaacacaaatatgaaatattggtcctggatgggcgcgttttctctgtcgatgctcttctgggccgaactcctctggatcattactcactgatccttgaccccgctgcggcggggttgtcatttgctttgccacaaggtttctcctcttttatcaatttgggttgttatcaaatcgttacgcgatgtttgtgttatctttaatattcaccctgaagagaatcagggcttcgcaaccctgtcattaaggaggagctatgagcagtaccctacgagaagccagtaaggacacgttgcaggccaaagataaaacttaccactactacagcctgccgcttgctgctaaaagtctgggcgatatcacccgtctacccaagagtctcaaagttttgctcgaaaacctgctgcgctggcaggatggtaacagcgttaccgaagaggatatccacgcgctggcaggatggctgaaaaatgcccatgctgaccgtgaaattgcctaccgcccggcaagggtgctgatgcaggactttaccggcgtacctgccgttgttgatctggcggcaatgcgcgaagcggttaaacgcctcggcggcgatactgcaaaggttaacccgctcagtccggtcgacctggtcattgaccacagcgtgaccgtcgatcgttttggtgatgatgaggcatttgaagaaaacgtacgcctggaaatggagcgcaaccacgaacgttatgtgttcctgaaatggggaaagcaagcgttcagtcggtttagcgtcgtgccgccaggcacaggcatttgccatcaggttaacctcgaatatctcggcaaagcagtgtggagtgaattgcaggacggtgaatggattgcttatccggatacactcgttggtactgacagccacaccaccatgatcaacggccttggcgtgctggggtggggcgttggtgggatcgaagcagaagccgcaatgttaggccagccggtttccatgcttatcccggatgtagtgggcttcaaacttaccggaaaattacgtgaaggtattaccgccacagacctggttctcactgttacccaaatgctgcgcaaacatggcgtggtggggaaattcgtcgaattttatggtgatggtctggatagtctaccgttggcggatcgcgccaccattgccaatatgagcccagaatatggtgccacctgtggcttcttcccaatcgatgctgtaaccctcgattacatgcgtttaagcgggcgcagcgaagatcaggtcgagttggtcgaaaaatatgccaaagcgcagggcatgtggcgtaacccgggcgatgaaccaatttttaccagtacgttagaactggatatgaatgacgttgaagcgagcctggcagggcctaaacgcccacaggatcgcgttgcactgcccgatgtaccaaaagcatttgccgccagtaacgaactggaagtgaatgccacgcataaagatcgccagccggtcgattatgttatgaacggacatcagtatcagttacctgatggcgctgtggtcattgctgcgataaccagctgcaccaacacctctaacccaagtgtgctgatggccgcaggcttgctggcgaaaaaagccgtaactctgggcctcaagcggcaaccatgggtcaaagcgagcctggcaccgggtagcaaagtcgtttctgattatctggcaaaagcgaaactgacaccgtatctcgacgaactggggtttaaccttgtgggatacggttgtaccacctgtattggtaactctgggccgctgcccgatcctatcgaaacggcaatcaaaaaaagcgatttaaccgtcggtgcggtgctgtccggcaaccgtaactttgaaggccgtatccatccgctggttaaaactaactggctggccagcccgccgctggtggttgcctatgcgctggcgggaaatatgaatatcaacctggcttctgagcctatcggccatgatcgcaaaggcgatccggtttatctgaaagatatctggccaagcgcacaagaaattgcccgtgcggtagaacaagtctccacagaaatgttccgcaaagagtacgcagaagtttttgaaggcacagcagagtggaagggaattaacgtcacacgatccgatacctacggttggcaggaggacagtacctatattcgcttaagccctttctttgatgaaatgcaggcaacaccagcaccagtggaagatattcacggtgcgcggatcctcgcaatgctgggggatagtgtcaccactgaccatatctctccggcgggcagtattaagcccgacagcccagcgggtcgatatctacaaggtcggggtgttgagcgaaaagactttaactcctacggtagccggcgtggtaaccatgaagtgatgatgcgcggcaccttcgccaatattcgcatccgtaatgaaatggtgcctggcgttgaagggggggtgacgcggcatttacctgacagcgacgtagtctctatttatgatgctgcgatgcgctataagcaggagcaaacgccgctggcggtgattgccgggaaagagtatggaagtggctccagtcgtgactgggcggcaaaaggtccgcgtctgcttggtattcgtgtggtgattgccgaaagctttgaacgaattcaccgtagcaatttaattggcatgggcatcctgccgctggaatttccgcaaggcgtaacgcgtaaaacgttagggctaaccggggaagagaagattgatattggcgatctgcaaaacctacaacccggcgcgacggttccggtgacgcttacgcgcgcggatggtagccaggaagtcgtaccctgccgttgtcgtatcgacaccgcgacggagttgacctactaccagaacgacggcattttgcattatgtcattcgtaatatgttgaagtaacaactatttgcttgccggttattttgcttccggcaagcaaatgaattacacaatgcaagagggttatttgttcagcaaatggcccattttctcggctttggtatcgagataatgttcgttattggggttacgacctacaatcaatggtacgcgttcaacaatattaatccctgcttcggtcagaatttcgacttttttcgggttattggttaacaagcggacttcattgacgccaaggagtttgaacatatcagcgcaaagagtgaagtcgcgctcatcagcggcgaagcctaactggtggttagcctctacggtatcgtaaccttgatcctgcagtgcgtaagcgcggattttattcagcagaccaatgttacgaccttcctgacggtgatacagcaaaataccacggccttcctcggcaatttgcgtcaatgccgcttcgagctggaagccacaatcgcagcgcaagctgaacagggcgtcaccggtcagacattcggaatggacgcgcgcaagtaccggggtatgcccggaaatatcgccatagactagcgcgacatgatcgtgtccggttgccagttcttcaaatcccaccatcaggaaatcgccccatggggttggcagtttggcttctgccacacgtttaagctgcatgaaattctccagataatgctggttctgtattggcttattttgccataacgagaaggggttcacctaatcacgacgcgtcgatcgttcacggaatggcacaaatctgtcaatttttcctggaactggcgttttcagttatgattgtgggacttatcaaaaaggagaggccatgcgtagcattgccagacgtaccgcagtgggagctgcactattgcttgtcatgccagtagccgtatggatttctggctggcgttggcaacctggagaacaaagttggctactaaaagcggctttttgggttactgaaactgtcacccagccctggggcgtcattacacatttgattttattcggctggtttctctggtgtctgcgttttcgcattaaggctgcctttgtattatttgccattctggcggccgcaatccttgtgggacaaggcgttaaatcctggatcaaagacaaagtccaggaaccacgaccttttgttatctggctggaaaaaacacatcatattccggttgatgagttctacactttaaagcgagcagaacgcggaaatctagtgaaagaacagttggctgaagagaaaaatatcccacaatatttgcgtagtcactggcagaaagagacggggtttgcctttccttccggtcacacgatgtttgctgccagttgggcactgctggccgttggtttgctgtggccgcgtcggcgaacgttaaccattgctatcttgctggtctgggcaacgggagtcatgggaagccgcctgctgctcgggatgcattggccacgcgatctggtagtagctacgttgattagctgggcgctggtggcggtggcaacgtggcttgcgcaacgaatttgtgggccattaacaccacctgcggaagaaaatcgcgaaatagcgcaacgagaacaagaaagttaacgctggttgattttccgaatttagcccttaaatcatcaacaatgcgtgtggatgccatttcgcagacggcgcgaaaatggtactttaaagggctattgcggtaagttgaccataatttattcgctctaaccacataacgggaagtaatgtgaaatatttactcattttcttactggtgttagcgatcttcgtgattagcgtcacgttgggtgcgcagaacgatcaacaggtgacgtttaattatctgttagcgcaaggggagtaccgtatttccacattgctggcggtattgtttgctgcggggtttgctatcggttggttgatttgtggcctgttctggctgcgagttcgtgtttccctggcgcgcgctgaacgtaaaataaagcgactggaaaaccagcttagtcccgcgactgacgtggctgtagtgccgcacagcagtgcggcgaaggaataactttctatgctggagttgttgtttctgcttttgcctgtagccgctgcctatggctggtatatgggccgcagaagtgcgcaacaaaacaagcaagatgaagccaaccgcttgagccgtgattacgtagcgggggttaacttcctgcttagtaatcaacaggataaagcggtagacctgtttctcgatatgcttaaagaggatacaggcaccgttgaagcccaccttacgctcggaaacctgttccgtagccgtggcgaagttgatcgcgctattcgcatccatcagaccctaatggaaagcgccagcctgacctatgaacagcgtctgttggcgattcaacaactggggcgtgattacatggccgccgggttatatgaccgcgcggaagacatgttcaatcagctgaccgatgaaactgacttccgcattggcgcgctgcaacagttgctacaaatctaccaggctaccagtgagtggcagaaagcaattgatgttgccgaacgcctggtgaagctgggtaaagataaacagcgcgtcgaaattgcccatttctactgtgagttagccctgcagcatatggccagcgacgatctcgatcgtgccatgaccttgctaaaaaaaggggcggcggcagataaaaacagcgcccgcgtatccataatgatgggacgcgtgtttatggcgaaaggagaatacgccaaagccgtcgaaagtctgcaacgcgtgatatcccaggacagagaactggtcagcgaaacgctggaaatgttgcaaacctgctatcagcagttgggtaaaactgccgaatgggcagaattcctgcagcgtgcggtggaagagaacaccggtgccgatgctgaattgatgcttgctgatatcatcgaagcgcgcgacggtagtgaggccgcacaggtctatattacgcgccagcttcagcgtcatccgaccatgcgtgtgttccataagttaatggattaccacttaaatgaagcggaagaagggcgtgccaaagagagcctgatggtgctgcgtgacatggttggcgagaaggtacgtagtaagcctcgttatcgttgccagaaatgtggttttaccgcatacaccctctactggcattgtccgtcttgtcgggcctggagtaccattaaaccgattcgcggtcttgatggcctgtaatttttaaaaaaaatccgactttagttacaacatactaattattaatgttccattgtgctccggcaacgacggcgcagaaaaagcctgccaggggagaaatcgcaactgttaattttttatttccacgggtagaatgctcgccgtttacctgtttcgcgccacttccggtgcccatcatcaagaaggtctggtcatgacgttaactgctagttcttcttcccgcgctgttacgaattctcctgtggttgttgcccttgattatcataatcgtgatgacgcgctggcctttgtcgacaagatcgacccacgcgattgtcgtctgaaggtcggcaaagagatgtttacattgtttgggccacagtttgtgcgcgaacttcaacagcgtggttttgatatctttcttgacctgaaattccacgatatccccaacactgcagcgcacgctgtcgctgctgcagctgacttaggcgtgtggatggtgaatgttcatgcctctggtggggcgcgtatgatgaccgcagcgcgtgaggcactggttccgtttggcaaagatgcaccgcttttgattgctgtgacagtgttgaccagcatggaagccagcgacctggtcgatcttggcatgacactgagtcctgcagattatgcagaacgtctggcggcactgacgcaaaaatgtggccttgatggtgtggtgtgttctgctcaggaagctgtgcgctttaaacaggtattcggtcaggagttcaaactggttacgccgggcattcgtccgcaggggagtgaagctggtgaccagcgccgcattatgacgccagaacaggcgttgagcgctggtgttgattatatggtgattggtcgcccggtaacgcaaagcgtagatccagcgcagacgctgaaagcgatcaacgcctctttacagcggagtgcatgatgagtgattccaacagccgtctggtctacagtacggaaaccggacgtattgatgagtccaaagcggcccctgtacgccctaaaggcgacggtgtggtgcgtattcagcgtcagaccagtggacgtaaaggtaagggcgtttgcctgattaccggtgtcgatctcgatgatgccgaactgacaaaacttgcagcggaactgaagaaaaaatgcggctgcggcggagcagttaaagatggagttattgaaatccagggcgataagcgtgatttattaaaaagtctacttgaagcgaaagggatgaaggtaaaactcgcaggcggttaacataaaaagccacggatatatccgtggctttcgaatattttactgtgcgtattattcagttatttcgtactgaacagaatcaagcgtattataattgcgagtcgataatcgacatttatttacgattatttaccgacctggtgaccaataacacctccgacagctgcaccacctaatgtacccaacgtactgccatcggtcagtactgcaccgcctaatgcccctgcacccgcgccgattgcggtgttgcggtcccgtttagaccagttagaacaggcactcagagacattgccaaagtaattgccagaacagccgcggtcatttttttgctcgttacaaacataatactctctcctgaatttatgattcacggaagtaagctctctataactataatagctaagaataagtctggtgaaattattccgtgaaatctgctcgcgcgcagggttatatcacgcaggtgataatgacttcctgttatatcgctgataataattttatatcttgagagtgttaataacaggtaaatagtcttaattatcaaccaggaatcatcttagagcggatgatttgccaaactgcaaatcatccgtagagaagggaaatggttaaatgtcaacgacgtgaatggtgagtttactgtgctcaagatgcatcagatcgctggcgcgtattttgctatcggtaatcacgcgattgaatcgctcaacgggaccgatggagtaactatgtacagcaccaaatttgctgctgtcagtcaggactatcgcttcgcactctttttccagcacggcattgaccacatcggtacgcatcatatcgcgaccggtaaatccagtttcaggttgccagccatcaataccaataaatgctttgctgaaatgcacctgttggatgcactggcgtgtcaaagggccaaccatactttcgctttttttctgatacacgccaccgagcaaaataacttcacaaggcgcgtctttcagcaaatgcgcgatgtagctgctgaccgtgatgatagtgacatttttcttctgctcgcccagagtccgggcgagtagggcattgctgctgccattttcgataaagatggtttcgcccggttgaaccaggctcgcggcaaactcggcgagttcacgcttcagcgtatagttgctcatcatacgggtttcgacgtcatcactatcaaggctaacagcaaagccatgtgcacggcggaggtaactcagtttttcgagtgtgttgagatcctggcgaatggtaacttcagaaactccagtggcttttgccagatcggttacgctaacctgaccctggtcaatgaccatctgtagaatagtttgttgtcgggaattcatcgctgtaattcttataacgttataatacttaataaaaaaatactgacgcgccgggcatcctcaaataggaaaacctgaaggcacgattgttaaatctcccacggtgccttcgggatgtctggcgtagattcagcaacctggcgcaagagttctgctttaagtatctcgagattatggatcgcagagtggtaatcgcctgccacaaggatatctaacacaatatcaatacgttcggcaacgcgctgggcatcaaattcagacatcaaggacatccttatagcaaaagggggaaaatgaataatgcaaaaattgccgctaaaagagaagtgtttaacagcaacggctaattatcatccaggaatacgatatataatgacgggatatagcgctaagtatatatattcatctacttatgcgcgcttcagatagcgtttataccagcgttcgaaggcgacggcgggcatcggtttggcaaacaaaaatccttgccgctcattgatcccgttcttggttaaaaaagcatcttcctttgcactctctacaccttcggcgatcacctgaagattcaatgcctgggccacagcgacgatcgcccggaccagactctggctgacaggttgtttgtgaatatctcgaacaaaaacctggtcaagtttgatggcatcgatcggaaagcgcgccagttggctaagactagagtagccggtaccaaaatcatccagatgcacttgcgcacctagttggctaaattgttgaataacagacagtgccagttcatcattctcaatcagacaactctctgtcagttcaacatctatagggcagtattcaaaattgagttcctggagaacctgtttcagggcggtgaaaatggtttgatcggcgagctgacgtgcagaaatatttaccgccactcgcaggtttatgcctttatcccgccactttgccacctggcgtacgacatcgagaatcacccaacggcctaaaggcacaattagcccactctcttcggcgtaggaaatgaagtccaacggtggaatcaacccacgttcaggactctgccaacgtactagtgcttccagactgcgcacttcgccacgccaggtgattttcggttgatagtgaataaccaactgatcgttttccagtgctttacgcaagttggtatccagccagagatattcaaatacccgttgattcatttctggggtaaaaacgcaaaattgtcctcgtccgccttccttcgctgtgtacattgctgtgtcggcgtgacgaataatagccgtgctgtcactaccatgttcgggagagagtgcaatacctacactacagctggtataaacttcaattaaaccaatgcgaaaggggagccgtaagcgggtcaaaattcgacttgccattgcttccagcgcgctttgactggtgttggatgccagtaccagaaactcatccccacctggacgagccaacacctggtcatgttcgagacagcttaaaatagccaaactcacgtcgcgtaataactggtcaccaaacaaatgcccataggcgtcgttgacctttttgaaattatccaaatcaagatacacaaccccaactttattgttatctgcatgattaatagcgtgatcgattaaatcctgcattgcgttacgattcggcagtccggtgatactgtcggtatttgccagaatacgcagtcgctcctgagcgcggcgctcttcggtaatgtcggtgccggaacagattaaaaaaatctcgtttttgccactgccgctgtggacaaatttattgcgaaacagaaacagccgctggcctttacatgttggtatccacagttcgacttcatatgcattgccgcttcgaaaaaatacacggttattgcgcctggatgccgcagcttcacgacggctcataaacagtttaaacacgctttgcccaatgacgtcgtgttctttcaaccctgtgtaatcttcacataaccgattgaagcgttggatattcccccggctgtcgagaatcactattgcggaatatgcttcagaaactacctgctcagcaaaggaaagcccgtgacttaaatcacgagcaaccgccggtgtgtcatgccatgcagacgcgttgccagcccattcccgtttattgatttttcgtcctaccagatgcacagaaagatcgctttcatcgacggtcagactcatcatcaggctggaggtgatggccgtcatttccctgatgcgagcagcctgttcggcagataactgcaatgtacgatcaggttctgtggtttcggtggtagaaaagcgcaaaacatcgctgctttccgtcaaccgccagtatggattgtggcttccgagaaagttgtacaacgttgtggactccctaacggttttcatgatgcatatcctccggttaacagcggagtccgcggttaaataaaaggaacaacatgacttacatgaaattaacggcggctaaacgcattgttttttttatatatttatttgtaatccagttttggaaaaacgccagttttcaaacgaaagtcagttaaaaaatctgcctggatataacgaaggtagagcggggaaataaacggcccatccatgaggaatgggccgtgaaaggagattacgcgaccgggcgcgcaataatgctgcgggtttccatgcggacttcggcaatagtgacgtcaataacgtcagtcactttgtaaaccgtttcacctttaatttgtacagtgccgttttcctggctgcaaaccagttcatcgcgcacagcgtgtaagaaaggtgccggaataaaggcgatagcgccgttatcaaccaaacgaacacgcatgccgccacggctgatatcgacaatttccgctgcgaaacgggtgtcggtcccggctttgtctttcaggaagcgtgcgtataaccagtcaccaacatcacgttctgccatccggttgagacggcgacgctcggccatttggacagtgatttcatcctgtgggcgcgtcgcagtttcgcctttgataaccgctttcagcagacggtggttgatcatgtcgccatatttacggatcgggctagtccaggtggcgtatgcttccagaccgaggccaaagtgaggaccgggttcagtgctaatttcagcaaaactctggaagcgacgaatgcggctgtcgaggaaaccagttggttgcgcgtccagttcacgacgcagtttgcagaaaccgtccagcgtgagcacttcttcggcatcgacatgcagaccgtgcgttttcagcaacgctgccagcgcgtcggcattcgccggatcaaagcccatatgcacgttatagatgccaaaaccgagcttatcgcgcagtacgcgggccgcacaaatgttagcggcaatcatcgcttcttcgacgatacggttggcaatgcgacgaggctcggcgacgatatccagcacttcacctttttcaccgagaataaagcggtaatccgggcgatctttaaacaccagtgcgtggttatgacgccactcgccgcggcgttggcaaatttgcgctagcaaacggacttgttcggcaattgcttcactttcaggctgccagtcaccggtattttccagccagtcagaaacctggtcatacaccagctttgctttggattcgatggtggcggcaaagaattcgatattatcttcaatggtgccatcagcggagagcgtcatgcggcatgccagtaccgggcggacttcattggcgcgcagactgcagagatcgtcagaaagctcgcgaggcagcatagggatgttgaagccaggcagatagttggtgaatgcgcgaattttcgcggctttgtccagcttgctgccttcagcaatccacgcggttggatcggcaatcgccacaatcagctgaagtttgtcatccggcaacgccttagcgaaaagggcgtcatccatatcttctgtgctggcactgtcgatggtgacaaaatccagcgcggtcagatcttcacgaaccagaccttcatcgagcatttcggtagcgacgccgtctggtgcttctttttccagattatggcgtgcaagggtaacccaccacggtacaaagtgatcgtcaccaaaagtgatgtattgtgtcagttctgcatagaaagaacgatcgcctttcagcggatgacggcgcatttcggcaaccgcccagtcgccttctttaaactcgtggttcaggccacgggctgcgcggcaaggaatggcgtcttttaagagtggatgatcaggaacgatggccagacggtcatttttgccctgaaccttacccacgaaacgagtcaggaacggttcaaccagttcttctggctctgcggattcacgttctttttcactgtggatcaccgcgataattcggtcgccatgcatgacttttttcatctgcggcggcggaatgaaataacttttttgcgcgtcgacttccaggaagccaaagcctttttctgtggcttttaccaccccttcagcgcgtggcgtctgggaatgcagttgctgtttaagctgcgctagcagcgggttgtcctgaaacataattgtctattttggtggccattagagcggctgacagttttacgcgaatctgtctgacgcggcaaggttaatatgtctcacccaacgcgatttttaagcgatttatccagccacacagcccgctccataccagcagattaataatctgcgtactacttttttcgtgttcgagtaaagggctgaactgggcggcgctaaagcgatcgggtgctcgggtcagccattgtatcgcctgaacggtagcgcgctcaacagaatgacggtcagcccattggttaatttcattttcgcccttgcgcataagggtgctgatttttttatattcattactactatccatacaggtggcaaaacaagcaggactgccatttatacgcgcgcataacaacgccgcaagctgattatccggctgtgtattgccccgtgtgctgtttaacaacttttcgagaagggaaagactaatagggtggagagagagtatttcggccagttggcaaagttctgcagtactactttttgtgtgctcttcaggtagtttttccacctcatagctgcttcgccagcgtaaactttcatcagcaaacagactcgcgtcggcgtagttttgtatctccagcccgggtaaccagcgtaccggatgcccgagataagcctgaaatgtcgcaattgtccgcgcctgaaagccaataaaaccaatgatttggctaatgatcacacagtcccaggcagtaagaccgacgtcattcagatgctggcggcttcggttgtcgataatagaagggctgctagccagttggcgggcatattgcgtgatttgtgccaaccgatgattactttccctggtggaatcaggcccggggagcggcgtaagtcgcgcgctatagtagttacataaccgctggacgccgcaaacctgagcaaccgtcagggccgtgctcaagcgttcataagcggtgaaggtctgactacgggtcacggtaagctggtcagggaacaaatccactgcaagaacacgcgcagggtccagccaactaaggaagggggccagcgtttctttttcaaggatcacgtcgagtagaaagggatcgctgacctttgcggcttccgggaccagaggcagaacgtcatactccgtagtactggattgcgtttcatgataccagtggcttttgccggtgatgtggcgttgttccatgggcgctccttggtcgtaaaggaaatcgttatcctgacgcaaggcgggaaggggagaaagacggatcggcgataacaaatatcagaaaggtataacagagataacgggcggcagaacgccgcccatctttaccaacagaacgattatttcagttcgagttcgttcattgcagcaatgctgaaaccgccgtcaacgtggaccacttcaccggagataccggcagagagatcggagcacaggaatgccgcagagttacccacatcttcaatagtaacggtacggcgaatcggggtaacggcttcgcaatgagccagcattttgcggaagtctttgataccggaggccgccagagtacggatcggaccagcagagatggcgttaacacgcacaccttccggacccatcgcgttcgccatatagcgcacgttcgcttccagagacgcttttgccagacccataacgttgtagttcgggatagcgcgctcagcgccaaggtaggaaagggtcagcagggcagaacccggattcagcatggagcggcaagcttttgccattgcaacgaagctgtaggagctgatgtcgtgggcaattttgaagccttcacgggtaacggcgttaacatagtcaccatccagctgatcgccaggtgcaaaaccaatagagtgtacgaaaccgtcaaatttcggccaaactttccccagttcagcgaacatggtgtcgatgctggcatcttctgcaacatcgcactgcagaacgatgtcagaacccaattgagcggcaaattcttctacgcggcctttcagtttgtcgttctggtaggtgaatgccagttcagctccttcgcggtgcatcgcctgagcgataccgtaggcgatggatagtttgctggcaacaccggttaccagaatgcgcttaccggaaagaaaacccatagctttaatccttattgttgatgcttgttgtgcctgaaaatcaggcgattcgtcgttttagtaaacagtacgaacagataaacggttattataatcaacctggctgtgagtagctatagttgccaggtccgaccggagcaggctgcggcagggggggcgcttttcccctcaccctaaccctctccccagaggggcgaggggaccgtattgtgcaaatattgttaccccagcaacaaacaggctcatacagcccctaaccctttcatggcgatggctgggacggttcagaccttgccgaatattctccagcaccgtctccatgttttcaccacaacagctattcggctcggtctgccccctcgctctttcagggagagggactccggcggttcagttcctgcagaatattctccagcaccgtctcctcattacaatcaatctcgttattccagaaacgcagcacggtccagccctggctctcaagccagctagtgcgcctggaatcataggcaactgctaaatcatgctgcccaccatccagctcaacgactacacgcgcgctgcagcaagcaaaatcgagaatgtagctccccactggatgttgacggcgaaatttgaaatcactaaaacgtcggctgcgaagatatcgccagagctttcgttcctgcaaagtgagattgcgtcttaaatcacgcgcattacttttaattttatctatcacctcattctgacaagatttaatcttttgtcagaatgaggtgaataatctggaaggaggattcagaaaattagcgatctttacgccacgcatccgccgtcaatgcctcgccaaaatgaccggcaatcagccgtttggtgagttcatgcagcgggcttgccagcacatccgcggtgctgcctcgctcgacaacctcgccctgatgcatcaccagcacctggtcgctaatgtgcttcatcattccgatatgctgggtaacataaatatagctaatgccctgtttttcctgtaattccagcatcagattaatcaactggctacgcatgctcatatccagactagcgagggcttcatcggcaataatgacttttgggcgcaatatcagcgcgcgcgccagacccagacgctgtttttgtccgggtgccaacatatgcggatagtaactgacgtgatccggtagcagcccaaccatacgcatcgtttcaataatctgtttgcgacgctgttccggttccaggtcggtgttcaggcgcagtggaaaatccagaatttggctgatacgttgacggggattcaagctggtgctaggatcctgaaaaatcatgcgaatacgctgactgcggaaggaataatcgccaaaatgcagtggatgatcgtcaatcaataactcgccgctggtaggctctatcattcccgccagcatttttgccagcgtggatttaccgctaccattctcgccaataatcgccagtgtctggccttcacgtagcgtaaagctcaagggttttaccgcttctacggtctgacgacgaaaccagccggtccggtagcggaacgttttacttaaattacgcacttcaagcagcgtttcgatcatctcactctttctccatgttcagcgggaaatgacaggcatagagatgatttttcgcccccgtcaaacgtggcgtcacaatgcattctcgttgtgcatacgggcaacgtggccccagacgacaaccaatcggtaactgttccagcagtgggatagcgccgggcagcgtattgaggcgacttttatgcggcatcgcgctgccgaagtctggtatcgcgcggatcagcgcctgggtataaggatgatgtggcatcgtcaccaactccttactcggcgcggtttccactgtttgaccgcagtaaagcacgttaattttatccgcccattggctaagcatttgtaagtcatggctgataagcaaaatagtggtattgctgttttggttgagacgcgtcagcaggcgaaagatttgcgcctgggttgttggctccatactgttggtcggttcgtcagcaatcagcagacgcggttgattcgccagtgcaatggctatcatcactttctgacattcaccttcggtcaactcatagggaaaactgcgcatcgcatctttgtgatctttaatccccacgcggtgcagcagttcaatggcacggcgtttgcgccagccaaaacgctgccaccaacggcctttataggtccaggctgggatgttttgcatcaactggcggcccacacgttcactagggtcaagacagctctgcggttcctggaaaatcatgctcacgttatggccaaccagtttgcgccgttcgcgtgcggagagacgcagcaaatcgatatcatcaaaacgcatacggtcagcagtaacacgccagttatctttattcaccccacaaatcgctttcgcaatcaaactcttgccggaaccggattcaccaacaagaccgcggatttcaccttcggttaaggtcatacttacccggtcgacggctttaacccactcatcaccggttttaaattcaatggtcaggttacgaatatcgagtaatggcattattccacccccgcaataatcgcacgacgaacgccatcgccaaggaggttaaccaacaacacgctaatcataattgccgcacctggcagcatgacagtccacggggcgacataaatcagttccagcgcatcaccgagcatcgctccccattcagggctggggagttgtgcgccgagatcgagaaagcccagcgcggcgatatcgagaattgccatgctcagtgcgcgggtgatctcggtgaccagcccggcggtgatgtttggcatcacagcaaaccagagaatattcagcgtacttgcgccatccagacgggcggcgataacgtactctttttccagttcgtcatgcaccatgctgtaaatgctacgtaccatacgcggcagcaatgccagccagacagcaaacatagcgtgggacaaactcggtccggcaaacgctacaacgataattgccaacagcaggctagggatcgccagtaaggtatccagaatatggttaagcaccgcactgcggaggccgtgtgtcgccccggcgaaggtgcccagtaccaggccacagatcgtcgcggcaagcgtcaccacaaatgcgccacccacggttggcgcagctccgctcagtaaacggcttaaaacatcgcgtccgaggtcgtcagtccccaggaagaaagaaacttcgccatagcggctccaactcggcggcaataattgataaccgagaaattgctggtcgatgccgtaaggcgcaaaccagccgccaaaaatacacagtacagccagccccgcgcagccgtacaggccgaccatcgcagaggcgtcactataaaatttgcgccaggcggtacgcagcgtgcccggcgggcgcttttcgctgtatacgctatcgtaaggcataccattccttatgtttcagattatttatcgtaaggcataccattccttatgtttcagagggttagccatggcacccaaaatatcagaaatcacgttaacaataatgaccagactgccacacaccatcactccggcggaaatggctgcgtaatcctgctggcggatggcgttaattaaccagcgccctaaacccggccagctaaaaaccatttcggtgatcatcgccagcgtcagcatggtggaaaactgtaagcccaggcgaggaataaccggcggtaacgcgttatgcagaacgtggcgacgcaaaatagtaaagcggctcaaaccgcgggtcgccgccgcttttacatagttctggtcatacacttcgatagtgctgatacgcatcaggcggatcacttcagttgttggcgcaacgctcagggtgatcacgggcaatatcatatggcggattgcgctcatgatcatttcatcccgccatggactgtcgctaagccaggcatcaatcaacgcaaaaccggtaatcggtttcacttcgtagagcagatcgaaacgcccactaacgggcaaccaacctagcgtgagactacaaaacagcgtcaacagaagcgccagccagaacaccgggatactaaagcccagtaaggcgatggcgttgatcaagttatcctgccacttatggcgcgtaatcccggcaatcatccccacggggatgccaacaatcagcgcaaaaccgaaggcgaggatgcacagttccatcgtcgccgggaagacctcttttaactgttcggcaatcggttgaccgttaatgctggaaacaccaaaatcccagtggatcaggccgttaaaccagaacacccaggcattccacagactcgcgccttgtaacggcgcatgaggggtgaaatagctcaagctgaagccaacgaaggtcagcaggaacaaggtgacaatcaataacaaaatgcggcgtaaggtgaagataatcatggttttttcacctcatcctgtttctcgcgatacaccccagcaaaggaggcgttaccaaacgggctaagtaccagacctttgatatcgtaccgataggcctgcaaacgcaaactgctcgccagcggcaaaatgggcaattcctgcgccagaatactctgcgcttcgtcataggcttcaatacgcgccgccagctgctggctagagagcgccttacgcaatacgctgtcgaatttcggatcgcaccagtgggcgaggttggtctggctatgaattgccgcgcagctcagtaacggacggaagaaactgtccgggtcgttactgtccgtcgcccaaccggataacgtcagatcatggctcatatccatcaaccgcgcctcctgaaagcgaccttctaccggcacaatcaccacttttacgccaacctgcgccatatccgcctgaatcagttcggcagttttcagtggactggggttccacgcctggctacgtgtgggcacccacagtttcagcgttaaattttccagccccaagctcttcaactgttcgcggcttttcgccggattgtattcagtaattttagcctcgttgtcataggcccagctggcgcgcggtaaaatagaggccgccgtttcagccgtaccataatagatggattgcatcaggcgctggttattaatcgccagtgccagcgcatggcggacagcgggattatttagcggcggtttggcggtgttaaatgccagataggcgacgttcatcccaggacgcagcgttaaacgcaagcgcgggtcgtcacgcaaaatggatagctggctggcagcaggccaggccagaacgtcgcattccccggtcaggagtttgctcagacgtccggtgccgccggagcctaaatccaccactacctgcggcattaacggtttaccgcgccagaagtcatcatgacgttgtaggcgaataaattgcccggcgcggtattcgctcaactgatacggaccggtgccgaccggttgacggtcgagttgctcctggcgatcttctttctctaacttccgggcatattctgcgctcatgacgctagcataatgggttgcgaggtgccacaaaaaagaagcatccggctgggcgagtcggaactcaacggtatgattatccagtttgcggacgcttttcacgttatcggcaaattgcaggctgtcgaagtaggggaagttgctgccgttgacgttatgccacgggttgttgcggtcaaaaattcgctggaaggtaaacaccacatcgtcggcattcattttacgagtgggagtaaaccagtcggttttttgaaacggaacatcgcgacgcaggtggaagcgataggtcgcgccgttgtcgagtacttcccagctttcggcaagttccggcatcaggcgataggtatagggatcgacatccagcagtcgatcataaaactgggcggcaagggtatcgacaattaacccactgctcgctttggatgggttaaaggtgttgacttgcccgctgacgcaatagacaaaaccgctgtcgcggatatcagcatgcgggggagattcaggcgcggcgattgcctgaccactcacaagtccagcaatcaccaaaagagagcttaatacctggcgcataatattaagggattttatgtaaagaggctatcttactaatatttaatgacatttgccattaccgtttgtgttcaggggtcgtaatgagggccgtgtggttggtcgttgaacaggtgacgtcgccatctgttcaacattcgtacccgtgatttctctataactataactcacagaacaacttagcgaggagcagagcggtacgatcgtgagaaacccattaaagcacgctgcagtgcgtgtcattgttagccagatgcggcgtgaacgctttatccggacaacgatactgaccgatcgtctgcaattaaatcattactcattaccccattgattcaaaaactctgcgatctcatcaatgcgtacgggattaatccccgcttcagcagccatttcatgttgggcttcttcgctgatctcttcattgttcatcaaacgggtgagcagtaactggaagtagtgggccagcggtgtgcgttcagcctctgcgacaggctctgcgcattcggtcgcgtactcatcggcaatatcaaaatattttagcgggatatcgtggttcattatttgcccctggggttaatgcgctaagcataagggcggatgatagcactcgtgatccgggtcatacatctttttatagttaatggcgcggcgcgttaccctcaggcaggataatgcgccgcgcatccgactattacgtttcactcaccggcgttctgtcaccatcatacaacggcactttgcgatagcggcggatcagataccataaatatgcgccgcctaagctagcccataccagaccgagtgtcagactcgtactctcgaggttaacccacagcacacccaccgtcagcgcgccaaccagcggcatcagcaaatagtggaagtgatccttccagcttttattcattcctttacgccgccagaaatgattaaacacgctcagattcacgaaggtaaacgccaccagagcaccgaagttaattaacgctgtggcggtaactaaatcgaagaacagcgcgctcaacgcgacaatcccgaccataatgacgttgagtgccggagtccgccattttgggtgcacatagccaaacacgcgctccggaaacacattgtcacgccccatcacatacagcagacggctcacgctggcatgactagccaggccagaggctaacgtgttcacaaacgtggtgcagaggaaaatgctctggaagagcttgccgccgacgtacagcgcaatttcaggcagtgcggcatccggatctttaaagcggctgatatcgggaaagaacagctgcataaagaagctcgccgcgataaagataacgccaccgtagaccgccgtcaggaagatggctttcgggatcacgcgtgcggcgtccggcgtctcttcgctaagcgtggtcaccgcatcgaaaccgaggaaggagaaacagacaatcgtcgccccggtaataatcgggatcaggtgcgcgttctcgctgataaacggctgaagactccagacggtgccaacgccttctcctttatgcagtccctgaactaccaggaagataaacaccaccatgatggagatttgcaccagtacaaacagggtattgaagttagcgaccaggttgacgctcttcagattcgcggcggttaaaatggcgacgaaggttaccacccacacccacggcggcacttccgggaagagggcggagagatagattttcgccaacaagacgttaatcatcggcaaaaagagataatccagcaggctactccagccgaccataaatccgacgtgcgggttaatgctcttttgcgcgtaggtataggcgctaccggcctccggaaactggcgaaccagtttgccgtagctgatagcggtaaacagcacacccgccagcgccagcaaataggacgccggaacgtgaccgtcgctaatgccggagacaataccaaaagtatcaaatacggtcatcggcgtgagataggccagacccatcatcaccacctgccacaatttcagactttttcgcagacgggttttgccgggttgcgcagcaatattcagtggactattaatagccataattgctgcctcccctgcgtaataaggtttgcggtcgtgtcgacctgaaatcaaacctgtttagcaagggaagcaaagggggcggagtccagtcagtagcaggaggggcgcatacgcagcctccctcgccatgcggggatttaatcatcggcatcatctcatttcctcgtcacagtcttaatcgttaacggaagcccgttgccgcccgcgctccataacgcgacatccgggaaatgtctggattaccagcaaatgtcaggcctggctccgctcaggccgatgaaacaaccccgcaaggggtattacgcgtttttcaacatccactcaatttctgtttctgtgatgaggcgctcaaactgcaacagctcatcatttttacaggcgtgatagacatggcagaagcgttcgcctaaatagcggcgcaggtgatcattctcgataaactcacccagggcatcgctctggcgaatcggaaagggtaagccttcctgttccagcccgttgccttcgacttcttcctgcaacggcagctcgttatcaaggccatgcaaaataccggcaaaaatcgctgccatcaccagatatgggttggcatcggcacccgccacgcgatattccacgcggtgattatgacggtcgccgcacggaatacgcagggcgacggtgcggttgttatggccccagctcgcctgcgtcggcacatacattcccggctggaagcggcgatagctgttcacgtttggtgccagcaacgccatgctgctcggcatcaggtcaatcatcccggcgagcatctttttcagcagcgggctatcttcgccttccgcgtcagaaagcacgttctcgccacgattattttgcatactgatatggatatgcattccgctgcccgcgtgctcttcatacggcttcgccataaaagtggcgtgcatcttatgcttttctgccatcagacgcaccaggcgttttagtgccagcgcatcatcgcaggcttccagcacgttatcagtatggtaaaggttgatttcaaactgacccgggctggcctcagcgaccgcgccatctgccggaatcagctgtaactgcgccagttcatcaatatcattgagcacgtcggcgaagtggttgaggttatcaacggagtaaacctggctttgtgtattgcggtcatcggtgccaggcgcgcagggcggttgcagatacccttcagcgtcgcgctggcgatccagtaaatagaactccagctctaccgctacgaccgggaacaatccgcgctggcgcagctgctgccacaggcggttaagaacgttccgcggctcaacgtcaaagggagcgccatcttcatcgaccatggtcaggagcatctgaccgataaactctggatcggcggcagaaggagttaaggaaccgagaacaggaacacaggtacgatccggctcgcccatttcctgacccagacctgcttcttctactacgttgcccagaatatccattgcaaatacgctggccgggaaataacaccctttctcgagcttcttcaggctactaacaggaatacgctttccacggaagcaaccatttaaatcggtaagtaaaacatcaacatattgcgtattcgggtagcgctccaggtagcgtttcacttcctgcgtaaaggcgctaccccgcctctcttcactctgctgaacaaagttctctacttcaacgatattggtttccatgattcttcgcctttggtttgttttccgctcgttatcaaagcgtaaaatataatgaccaccattcgaatctgtatgcaaactaaatgtttgtcaaatgttaaattgagtttgcaaaaatgaaaacccactgctagattgaaaaaatattgaacataaaggtcatttaaagcgcagtaatggcgataatttagtccactttgtgagattgagcatggaaaatataatgaacaatccggttatcggtgtcgtaatgtgcaggaacaggcttaagggtcatgcgacccagactctgcaagaaaagtacctgaatgccatcatccatgcaggcggcttgcctattgcgctaccacatgcgctggcggaaccgagtttacttgaacaacttttgccgaaactcgatggcatttatcttcctggtagtcccagcaatgtgcagccgcacctatatggtgaaaacggcgatgagcctgacgccgatcccgggcgtgatcttctgagcatggcgataattaatgccgcactcgaaaggcgcatccccattttcgccatctgccggggtttacaagaactggtggtggcaaccggtggtagcttgcatcgcaagctgtgcgaacagcctgaattgctggaacatcgggaagatcccgaactgccggtggaacagcaatatgcaccgagccatgaagttcaggttgaagaggggggattactgtctgcgttgttacctgaatgtagcaacttttgggtaaactctctacatggacaaggggcgaaggtcgttagcccacggttgcgtgttgaagctcgcagcccggatggcttagttgaggcggttagcgtcatcaatcatccttttgcgctgggcgtacagtggcacccggaatggaacagtagcgagtacgcgcttagccgtatattgttcgagggctttatcaccgcttgtcagcaccatatcgctgaaaaacagcgactctgaccactacagtttaaggaaatgcaaatatgagtgatgagggactggcgccaggaaaacgcttgagcgaaatccgccagcagcaggggcttagtcaacgtcgtgccgccgaactctccgggctgactcacagtgctatcagtacgatagaacaagataaagtcagccctgccatcagtacgctgcaaaagctgctgaaggtgtatggtctgagtctcagcgaattcttttccgagccggaaaaacctgatgagccgcaggtcgtcattaatcaggacgacttaattgagatgggtagtcagggtgtgagtatgaagctggttcataacggtaacccgaatcgcacgctggcgatgatctttgaaacgtaccagccgggcacaaccactggggaaagaattaagcatcagggtgaggaaataggcactgtactggaaggtgaaattgttctgacgattaatggtcaggattaccacctcgtcgcggggcaaagttatgccattaataccggcatcccgcacagtttcagtaatacgagcgcaggtatttgccgaattatcagcgcccatacgcccaccacgttttaatctttttgttctgtaagccgggtaagcgcaatgcgcccggcaatctatacacaaaatcattcaagttgcatcaaggcggcaagtgagcgaatcccgatgagcttactcaggtaagtgattcgggggagcgaacgcagccaaggcagaggcggcttgaaggatgaagtgtatataaagaatgtcgccagaaataaacgggcatacggcccggggatctctgcgccctgacgttcacaaactgcatatatctgatagacgtgaaacaggagtcataatgaattttcatcatctggcttactggcaggataaagcgttaagtctcgccattgaaaaccgcttatttattaacggtgaatatactgctgcggcggaaaatgaaacctttgaaaccgttgatccggtcacccaggcaccgctggcgaaaattgcccgcggcaagagcgtcgatatcgaccgtgcgatgagcgcagcacgcggcgtatttgaacgcggcgactggagtctctcttctccggctaaacgtaaagcggtactgaataaactcgccgatttaatggaagcccacgccgaagagctggcactgctggaaactctcgacaccggcaaaccgattcgtcacagtctgcgtgatgatattcccggcgcggcgcgcgccattcgctggtacgccgaagcgatcgacaaagtgtatggcgaagtggcgaccaccagtagccatgagctggcgatgatcgtgcgtgaaccggtcggcgtgattgccgccatcgtgccgtggaacttcccgctgttgctgacttgctggaaactcggcccggcgctggcggcgggaaacagcgtgattctaaaaccgtctgaaaaaagtccgctcagtgcgattcgtctcgcggggctggcgaaagaagcaggcttgccggatggtgtgttgaacgtggtgacgggttttggtcatgaagccgggcaggcgctgagccgtcataacgatatcgacgccattgcctttaccggtagtacccgtaccgggaaacagctgctgaaagatgcgggcgacagcaacatgaaacgcgtctggctggaagcgggcggcaaaagcgccaacatcgttttcgctgactgcccggatttgcaacaggcggcaagcgccaccgcagcaggcattttctacaaccagggacaggtgtgcatcgccggaacgcgcctgttgctggaagagagcatcgccgatgaattcttagccctgttaaaacagcaggcgcaaaactggcagccgggccatccacttgatcccgcaaccaccatgggcaccttaatcgactgcgcccacgccgacagcgtccatagctttattcgggaaggcgaaagcaaagggcaactgttgttggatggccgtaacgccgggctggctgccgccatcggcccgaccatctttgtggatgtggacccgaatgcgtccttaagtcgcgaagagattttcggtccggtgctggtggtcacgcgtttcacaagtgaagaacaggcgctacagcttgccaacgacagccagtacggccttggcgcggcggtatggacgcgcgacctctcccgcgcgcaccgcatgagccgacgcctgaaagccggttccgtcttcgtcaataactacaacgacggcgatatgaccgtgccgtttggcggctataagcagagcggcaacggtcgcgacaaatccctgcatgcccttgaaaaattcactgaactgaaaaccatctggataagcctggaggcctgaaatgaccgaacataccagcagttactacgccgccagtgcgaataaatatgcaccattcgacacgctgaatgagagtatcacctgcgacgtttgcgtggttggcggcggctataccgggctctcctccgcgctgcatctggcggaagcgggctttgacgtagtggttctcgaagccagtcgcatcggctttggcgcaagcgggcgcaatggcggacagcttgtgaactcctacagccgcgacatcgacgtgatcgaaaaaagctacggcatggacaccgcccgtatgctcggcagcatgatgttcgaaggtggtgagatcatccgcgaacgtatcaaacgttatcagattgactgcgactaccgccccggcggcctgtttgtggcgatgaatgataaacagctcgccacacttgaagagcagaaagagaactgggaacgctacggcaataaacagctggaattgctggacgccaacgccattcgccgtgaagtagccagcgatcgctataccggtgcgctgctggatcacagcggtgggcatattcatccgctaaaccttgccattggcgaagcggacgccatccgcctcaacggcgggcgcgtgtatgaactttctgccgtgacgcagatccagcacaccacgccagccgttgtgcgaactgccaaaggtcaggtgacggcgaagtatgtgattgtcgccgggaatgcgtatctgggcgataaagtagagccggaactggcgaaacgcagcatgccgtgcggcacgcaggtgatcaccaccgaacggctgagcgaagatttagcccgtagcctgatcccgaaaaactactgtgtggaagactgtaactatctgcttgattactaccgtcttaccgccgacaaccgcctgctgtacggcggcggcgtggtctacggcgcgcgcgacccggatgacgttgagcgccttgtggtgccgaaactgctgaaaaccttcccgcagctgaagggcgtgaaaattgattaccgctggacgggcaacttcctgctgaccctgagccgtatgccgcagtttggtcgcctcgataccaacatctattacatgcagggctacagcggccacggcgtgacctgtactcatctagccggacgtttgattgccgaactgctgcgcggcgacgccgaacgtttcgatgccttcgccaatctgccgcattacccgttccccggcgggcgcacgctgcgtgtgccgtttaccgcgatgggcgcggcgtattacagcctgcgcgatcgtctgggcgtttaattttcgattaaccgtgaagagtcaaaaggtgtgaaacatgagcaacaatgaattccatcagcgtcgtctttctgccactccgcgcggggttggcgtgatgtgtaacttcttcgcccagagcgctgaaaacgccacgctgaaggatgttgagggcaacgagtacatcgatttcgccgcaggcattgcggtgctgaataccggacatcgccaccctgatctggtcgcggcggtggagcagcaactgcaacagtttacccacaccgcgtatcagattgtgccgtatgaaagctacgtcaccctggcggagaaaatcaacgcccttgccccggtgagcgggcaggccaaaaccgcgttcttcaccaccggtgcggaagcggtggaaaacgcggtgaaaattgctcgcgcccataccggacgccctggcgtgattgcgtttagcggcggctttcacggtcgtacgtatatgaccatggcgctgaccggaaaagttgcgccgtacaaaatcggcttcggcccgttccctggtagcgtgtatcacgtaccttatccgagtgatttacacggcattagtacacaggactccctcgacgccatcgaacgcttgtttaaaagtgacatcgaagcgaagcaggtggcggcgattattttcgaaccggtgcagggcgagggcggtttcaacgttgcgccaaaagagctggttgccgctattcgccgcctgtgcgacgagcacggtattgtgatgattgctgatgaagtgcaaagcggctttgcgcgtaccggtaagctgtttgccatggatcattacgccgataagccggatttaatgacgatggcgaaaagcctcgcgggcgggatgccgcttagcggcgtggtcggtaacgcgaatattatggacgcacccgcgccgggcgggcttggcggcacctacgccggtaacccgctggcggtggctgccgcgcacgcggtgctcaacattatcgacaaagaaagtctctgcgaacgcgcgaatcaactgggccagcgtctcaaaaacacgttgattgatgccaaagaaagcgttccggccattgctgcggtacgcggcctggggagcatgattgcggtagagtttaacgatccgcaaacgggcgagccgagtgcggcgattgcacagaaaatccagcaacgcgcgctggcgcaggggctgctcctgctgacctgtggcgcatacggcaacgtgattcgcttcctgtatccgctgaccatcccggatgcgcaattcgatgcggcaatgaaaattttgcaggatgcgctgagcgattaatagcccaacgcaataatgtctgatgcgctgcgcttatcaggcctgcaaacgacgtattgattatgtatgccgaataaagcattcacgccgcatccggcaagttgtattgctcaacttcgttaaatctggtgctttttcaacaacgcgcggaactgatgataagttaaccccagtaattcagccgcgcgcttctggttatatttcccttgttgcaaactgagttgcagcaactctttttcctgctgcatctgaaactcacgtaaatccagcggcagtgttggaaggctggtggtttcactaacggcgatagcgtcttcaggcggacgccgtttaaagggatcaataatgatgtcatcaagcggataatcgctggtgccgtggcgatacacactacgttccaccacgtttttcaattcacgaatatttcccggccaacgataattcagcaatgtttctctggcgcgctccgtaaaccccgggaacagaggcagcttgatttcccgacacatctggatggcaaagtattctgccatcaacattatgtcgctttcgcgctcgcgcagtggtggcagttgtacaacatcaaaagccagtcggtcgagcaggtcagcgcgaaaagtgccttcattgaccatcgccgggagatcggcattcgtcgcgcataccaaccgcacattcacctgcaatggttggctgccgccaacgcgctccagttcaccgtactcaatcacgcgcaataatttctcctgcaccatcatcggtgccgtagcgagttcatcaagaaatagcgtaccgccgtcggcacgttcaaatctccctggatgacgtttttgcgcaccggtaaacgcccccgcttcgtgaccaaacagttcggaatccagcagattttcatttaacgccgcgcagttaagggaaataaacggcccttgccaacgggaggagagataatgcaggcggctggcaatcagctctttaccggtgccgcgttcgccgatgatgagcaccggtttgtccagcggtgcgagatggctaacctgttccagcacttcgagaaagctgttcgcctcaccaagtaaattatctttgtattctgccatgatgaaattcgccacttgttagtgtaattcgctaactcatcctggcatgttgctgttgattcttcaatcagatctttataaatcaaaaagataaaaaattggcacgcaaattgtattaacagttcagcaggacaatcctgaacgcagaaatcaagaggacaacattatgggtattttttctcgctttgccgacatcgtgaatgccaacatcaacgctctgttagagaaagcggaagatccacagaaactggttcgtctgatgatccaggagatggaagatacactggttgaagtacgttctactagcgcgcgcgcgttggcagaaaagaaacagctgactcgccgtattgaacaagcgagcgcgcgtgaggttgaatggcaggaaaaagccgaactggcgctgctgaaagagagagaggatctggcacgtgcagcgttaattgaaaaacagaaactgaccgatctgattaagtccctggaacatgaagtgacgctggtggacgatacgctggcacgcatgaagaaagagattggcgagctggaaaacaaattgagcgaaacacgcgctcgccagcaggcattgatgttacgtcatcaggcggcaaacagcagccgcgatgtgcgtcgtcagctggacagtggcaaactggatgaagcaatggctcgtttcgaatctttcgaacgtcgtattgaccagatggaagcggaagcagaaagccacagcttcggtaaacaaaaaagcctggacgatcagtttgccgaactgaaagccgatgatgcaatcagcgaacaactggcacaattaaaagccaaaatgaagcaagacaatcaataataacatccaggcggcgtccgaacgcgccgccgctcatcgtctaaggagtacttatgagcgcgctatttctggctattccgttaaccatttttgtgctgtttgttttaccgatctggttatggctgcattacagcaatcgttctggtcgcagtgaattgagccaaagtgagcagcagcgattagcgcaactggctgatgaagcaaaacggatgcgcgaacgtattcaggcgctggaatctattcttgatgcagaacatccgaactggagggatcgctaatggcgggcattaatctcaataaaaaattatggcgtattccacagcagggcatggtccgcggcgtctgcgccgggattgccaactattttgatgtaccggtaaaactggtgcgtatcctggtggtgctgagcattttcttcggtctggcgctgtttaccctggttgcttacatcattttgagttttgcgcttgatccaatgccggacaacatggcctttggtgagcagctaccttccagcagcgaattgctggatgaagtcgaccgtgaactggcggcaagtgaaacgcgtttacgcgagatggaacgttatgtcacttccgatactttcacgttacgtagccgtttccgtcaactgtgaggaaagttatgaatactcgctggcaacaggccgggcaaaaggtaaagcctggtttcaaattagcaggcaagctggtacttcttaccgcactgcgctatggcccggcgggtgtggcgggctgggcgataaaaagtgttgctcgccgaccgctgaaaatgttgctggctgtggcgctggaaccgctgttaagtcgggctgctaataaactggcacagcgttataaaaggtgaggggagtttcgcaaaaattgttaaatctcaggcgtataatggatggcaattttcatccatagaaggacgcttacatgtttaaaaaaggcttacttgctctggcactggtgtttagtctgcccgttttcgccgctgaacactggatcgatgttcgtgttccagagcagtatcagcaagagcacgttcagggggccatcaatattcccctgaaggaagtgaaagagcgcattgccaccgccgttccggataaaaacgacaccgtgaaagtgtattgcaatgccggacgccagagtgggcaagcaaaagagatccttagcgagatgggatatacccacgttgagaacgccggtggcctgaaagacatcgcaatgccgaaggtcaaaggttaaaagaattcaccatgagcggcgcttatgcgccgtttttttttctgtcacaccttatttacatccccatagattatttgcgtcagctcacaaatacgctttttccctggtaaaaaatgatttcctgcgtgactaaaacccttgtgctcaattgacagtttattttctgcggagtagtctctcgtttcatgggaccgctaccacggaaaggcaacatgaaacagaaaattacggattacctggacgaaatctacggtggaacatttaccgcaactcatttacagaaacttgtaacgcgtcttgagagtgcgaaacgattaattacacagcgacgtaaaaaacactgggatgaaagtgatgtcgtgttaattacctatgccgatcaatttcacagcaatgatttaaaaccattacccacatttaatcagttttaccatcaatggctgcaaagcatttttagtcatgttcatttgttgccgttttatccatggagttctgatgatggctttagcgtaattgattatcatcaggtcgccagtgaagcgggggagtggcaggatattcagcaactcggtgaatgcagtcatttaatgtttgattttgtctgcaaccatatgagcgcaaaaagtgaatggtttaaaaactatttacaacagcatccaggttttgaagatttttttattgccgttgacccgcaaaccgatctcagcgccgtcactcgcccgcgtgcgttaccgttattaacgccattccagatgcgcgatcatagtacgcgccatttatggaccacctttagtgacgatcaaattgacctgaattaccgtagccctgaagtgttgctggcgatggtggatgttttactctgttaccttgcgaaaggtgctgagtatgtccgcctggatgccgttggctttatgtggaaagagccgggaacaagctgcatccatctggaaaaaacacatctgattatcaaactgttacggagcattattgataacgttgcgccaggtacagtgatcattaccgagaccaatgttccgcataaagacaacattgcttactttggcgcaggcgatgacgaagcacatatggtgtaccagttcagcctgccgccactggtgctgcatgcggtgcaaaaacagaacgttgaggcgctttgtgcgtgggcgcaaaacctgacactaccttccagcaacaccacctggtttaacttcctcgcctctcacgatggcatcgggctaaacccgctacggggcttgttgcctgaaagcgaaatattagagctggtcgaggcgttacagcaggaaggtgcattagtaaactggaaaaataatcccgacggtacacgcagtccgtatgaaataaatgtgacctatatggatgcgttaagccgccgtgagagtagcgatgaagaacgttgcgccaggtttatccttgcccatgcgattttgttaagtttccccggtgtgccagcgatatatattcaaagtattcttggcagccgtaatgattacgcaggtgtcgaaaaactcggatataaccgtgcgattaaccgtaaaaaatatcacagtaaagagataacccgagaactgaacgatgaagctacattaaggcatgcggtatatcatgagttgagccgtttaattacacttcgtcgcagccataacgagtttcatccggataataattttaccattgatacgattaatagttccgtaatgcgtattccaagaagtaacgctgatggtaattgtctgactggattgtttaatgtcagtaaaaatattcagcatgtaaatattactaatctgcatggtcgggatctgattagtgaagttgatatattgggtaatgaaataacgctgcgcccctggcaggttatgtggattaaataaaaaggaacatctcatgattaaaagtaaaatcgtgctgttaagtgcactggttagttgcgccctgattagtggctgtaaagaagaaaataaaacgaatgtatccatcgaatttatgcattctagcgtggagcaggagcgccaggccgttatcagtaaattgattgcccgttttgaaaaagaaaaccctggcatcaccgttaagcaagtgcccgtggaagaagatgcctataacactaaagtcattactcttagtcgtagcggtagcctgccggaagtgatcgaaaccagccatgactacgccaaagtgatggacaaagagcagcttatcgatcgcaaagcggttgccacagtcatcagcaacgttggtgaaggcgcgttttacgatggcgtactgcgtattgtgcgtaccgaagatggtagcgcatggaccggtgttcctgtcagcgcctggattggcggtatctggtatcgcaaagatgtgctggcaaaagcggggcttgaggagccgaaaaactggcaacagctgctggacgttgcacagaaactgaatgacccggcgaataaaaaatacggcattgcgctgcctacagcagaaagcgtgttgacggaacaatccttctcccagtttgcgttatccaaccaggctaacgtctttaacgccgaaggcaaaatcacccttgatacaccagagatgatgcaggcactgacctattaccgcgaccttactgccaacactatgccgggttctaacgacatcatggaagtgaaagacgcctttatgaacggcaccgcgccgatggcgatttactccacctatatccttccggctgtgattaaagaaggcgacccgaaaaacgtcggtttcgtggtgccaaccgagaaaaactctgcggtctacggcatgttgaccagcctgaccattaccgccgggcaaaagaccgaagagacggaagcagcagaaaaatttgtcacctttatggagcaggcagacaacattgccgactgggtgatgatgagcccaggtgctgcgctgccggtgaataaagcggtggtgactaccgccacctggaaagacaacgacgttattaaggcgctgggtgaactaccgaatcagctaatcggtgaactgccaaatattcaggtttttggcgcagtaggggataaaaactttacccgcatgggtgatgtgacgggttctggcgtggtgagtagtatggtgcataacgtcaccgtgggtaaagccgatctctctactacgctgcaagcgagccagaaaaaactggatgaactgatcgaacagcactaaacccaggacaggaatccgcaatgaacaggctttttagtggtcgttccgatatgccctttgcgctgctgcttctcgcgcccagcttattactgctgggcggtctggtggcgtggccgatggtgagcaatatcgaaatcagttttttacgtctgccgctcaatcccaacatcgagagtacgtttgttggggtgagcaactatgtgcgtatcctctccgatcccggcttctggcatagcctgtggatgacggtctggtataccgcgctggtggtggcgggcagcaccgtgctcgggctggcggtggcgatgtttttcaaccgcgagttccgcctgcgcaaaaccgcgcgtagcctggtgatcctctcctacgtaacgccgtccattagcctggtgttcgcctggaaatacatgttcaacaacggctacggcattgttaactacctcggcgtcgatcttctgcatctctatgagcaggcaccgctgtggttcgataatccgggcagtagctttgtgctggtggtgctgttcgccatctggcgctacttcccgtatgcctttatcagctttctggcgattttgcagaccatcgacaaaagcctgtacgaagcggcagagatggatggcgctaatgcctggcaacggtttcgtatcgtcacgctgcccgcaattatgccggtcctggcgacggtggtgacactgcgcaccatctggatgttctacatgttcgcggatgtttatttgctgacgaccaaggtcgatattctcggtgtatatctctacaaaaccgcctttgcctttaatgatttaggaaaagcggcggcgatcagcgtggtgctcttcatcattattttcgctgtcattctgctgaccaggaaacgggtgaacctcaatggcaacaaataaacgcacactcagtcgcatcggtttttactgcgggctggcgctgtttctcatcatcacgctgtttccattttttgtgatgctgatgaccagcttcaagggcgcgaaagaggcgatcagtctgcatcctacgctgctgccgcagcagtggacgctggagcattacgtcgacatttttaacccgatgattttcccgtttgtcgactacttccgtaacagtctggtggtgtctgtggttagttccgtggtggcggtattcctcggcattcttggggcttacgcgctttcccgcctgcgctttaaaggtcggatgaccatcaacgccagcttttacacggtgtatatgttctctggcattttgctggtggtgccgcttttcaaaatcatcaccgcgcttggcatttacgacactgagatggcgctgatcatcaccatggtgacgcaaactctgcccaccgccgtgtttatgctgaaaagctacttcgacaccatccccgatgagatcgaagaagcggcgatgatggatggcctcaaccgtctgcaaattatcttccgcatcaccgtgccgttggcgatgtccgggctgatatccgtgttcgtctactgctttatggtggcgtggaacgactatctgtttgcgagcattttcctctccagcgccagcaatttcaccttaccggtgggcctgaacgcgctgttcagtacgccagattacatctggggacggatgatggcggccagtctggtgaccgcattgccggtggtgattatgtatgcgcttagcgaacgttttattaagagtggtttgaccgccggtggcgtgaagggctaaagcggccagtttctttacaaggagttttaaatgaaaaagttagtagccacagcaccgcgtgttgctgcgctggttgagtatgaagatcgggcgattttagctaatgaagtgaagatccgcgtgcgtttcggcgcaccgaaacacggaacggaagtggtcgacttccgcgccgccagcccgtttattgatgaagactttaacggcgaatggcagatgttcactccgcgtccggcagatgcgccgcgcggcattgagtttggcaaattccagcttggcaacatggtggttggcgacattatcgagtgcggcagcgacgttaccgactacgcggtgggcgacagcgtatgcggctacggcccgctctccgagacggtcatcattaacgcagtgaataactacaagctgcgcaaaatgccgcaaggcagctcctggaaaaacgccgtctgctacgacccggcgcagtttgccatgagcggcgtgcgcgatgccaacgtgcgcgtaggggattttgtggtggtggtagggcttggcgcaatcggtcaaattgccatccaactggctaaacgcgctggcgcttctgtggtgattggcgtcgatcctatcgcccatcgctgtgatattgcccgtcgccacggcgcggatttctgccttaaccccatcggcactgatgtaggtaaagagatcaaaacgctgaccggcaagcagggtgccgatgtgattatcgaaaccagcggctacgccgacgcgctgcaaagcgcgctccgcggtctggcttatggcggcaccatctcctatgtcgcgtttgccaagccgtttgccgaaggttttaacctcggacgcgaagcgcatttcaataacgccaaaattgtcttctctcgcgcgtgcagcgaaccgaacccggattatccgcgctggagccgcaagcgtattgaagaaacctgttgggaactgctgatgaacggttatctcaattgcgaagatttaatcgacccggtggtgacctttgccaatagcccggaaagctatatgcagtatgtcgaccagcatccggaacagagcatcaaaatgggcgttacgttttaattcaaaggaatgaaaaaaatgaaaatcggcacacagaatcaggcgttctttccggaaaacattctggagaaatttcgttatatcaaagagatgggcttcgatggttttgagattgacggcaaactgctggttaacaacatcgaagaagtcaaagcggcgatcaaagaaaccggtttaccggtgaccaccgcctgcggtggctatgacggatggattggcgactttatcgaagagcgtcgtcttaatggcttaaagcagatcgagcgcattctcgaagcgctggcagaagtgggcggtaaaggcatcgtcgttccggctgcgtggggcatgtttaccttccgcttaccgccgatgaccagcccgcgtagcctggacggcgaccgcaaaatggtgagtgattccctgcgcgtactggaacaggtcgccgcgcgtaccggaaccgtggtgtatctcgaaccgttaaaccgctatcaggatcatatgatcaacaccctcgccgatgcccgccgttacatcgtcgaaaacgatcttaaacatgtacagattatcggcgatttctatcacatgaatatcgaagaagataacctggcgcaggcgctgcatgacaaccgcgacctgctcggtcatgtgcatattgcggataaccatcgctaccagccgggcagcggcaccctggatttccacgcgctgtttgaacagctgcgcgcggataactatcagggctatgtagtgtacgaagggcgtatccgggcggaagatcctgcccaggcgtaccgtgatagcttggcctggttgcgtacctgctaagaggtctttgtgaaaagtgcaatgacaagctctccgctgcgggtcgcgataataggcgcaggccaggtggcggataaggttcatgctagctactactgcacccgcaacgatctggaactggtggctgtctgtgacagccgcctttcccaggcgcaggcgctggcagaaaaatacgggaatgcatccgtgtgggacgatccgcaggccatgctgctggcggtgaaacctgatgtggttagcgtctgcagtcctaaccgttttcattacgaacataccctgatggcactggaagcgggctgccatgtgatgtgcgaaaaaccgcccgccatgacgccagaacaggcgcgggaaatgtgcgataccgcgcgcaaactgggcaaggtgctggcctacgactttcaccatcgttttgcgctcgatacgcaacagctgcgtgaacaggtgaccaacggcgttttgggagagatttacgttaccaccgcccgcgccctgcgtcgctgcggcgttcccggctggggtgtctttaccaataaagaactgcagggtggtggcccgctgatcgacatcggcattcatatgctggatgctgcgatgtatgtgctgggctttccggcggtgaaaagcgtgaatgcgcatagctttcaaaagatcggcacgcaaaagagctgtggtcaatttggtgagtgggatccggcaacttacagcgtcgaagatagcctgtttggcaccattgaatttcataacggcggcattctgtggctggaaacgagttttgcactcaacatccgcgaacagagcattatgaacgtcagcttttgtggtgataaagctggtgcgacgctgtttccagcacatatctacaccgataacaacggtgaattaatgacgctgatgcaacgggaaatagcagacgacaaccgccatttgcgcagcatggaagcctttatcaatcacgtacagggcaagcccgtgatgatagccgacgccgagcaggggtacatcatccagcaactggtggcggcgttgtatcaatccgcagaaacagggacgcgtgtggaattatgaccaggccagtaacgttaagtgaaccccatttcagccagcataccctgaacaagtatgcaagcctgatggcgcaggggaacggctatcttgggcttcgcgccagccatgaagaagattacacgcgccagacgcgaggggtgtatctggcggggctgtatcatcgggcgggaaaaggtgaaatcaacgaactggtgaacctgcctgatgtcgtggggatggagattgccataaatggtgaggttttcagcttatcccacgaagcctggcagcgtgagcttgactttgccagtggcgaattacgccgcaatgttgtctggcgtaccagcaacggcagtggttacaccatcgccagccgtcgctttgttagcgcagaccaactgccgctcattgcgctggaaatcactattacgccactggacgccgacgcgagtgtgctgattagtacaggcattgacgccacgcaaaccaatcacggtcgccaacatctcgacgaaacccaggtgcgggtgtttggtcagcatctgatgcaggggagctacaccacccaggatggacgcagtgatgtggccatcagctgttgctgtaaggtgagcggtgatgtgcagcaatgctataccgccaaagagcgccgtttactgcaacataccagtgcgcagcttcatgcaggcgagacaatgacgttgcaaaaactggtgtggatcgactggcgggatgacaggcaagctgctttagacgagtggggcagcgcgagccttcgccagcttgaaatgtgcgcgcagcagagttacgaccaacttcttgcagcaagtacagaaaactggcgtcaatggtggcagaaacgtcgtatcacggtaaatggcggcgaagcgcacgatcagcaagcgttagattatgcgctttatcatctgcgcatcatgacgcctgcccacgacgagcgcagcagcattgcggcaaaaggcttaaccggcgaaggctacaaaggccacgttttctgggatacagaagtatttttgttaccgtttcatctgtttagcgatccgacggttgcccgaagtttactgcgttatcgctggcacaacttgccaggcgcgcaggagaaagcgcgacgcaacggctggcagggcgcgctatttccgtgggaaagcgcgcgcagcggcgaagaagagacgccggaatttgccgccattaacattcgcaccgggctgcggcaaaaagtggccagcgcgcaggcggaacatcatctggtggccgatatcgcctgggcggttattcaatactggcagaccacgggggatgaaagtttcattgcgcatgaaggcatggcgctacttctggagacggcaaagttctggattagccgcgcggtgagagttaacgatcgtctggaaattcatgatgttattgggccagacgaatataccgaacatgtcaataataatgcatacaccagctatatggcccgctacaacgttcaacaggcgctgaatattgcccgccagttcggctgtagcgacgatgcgtttatccatcgcgccgaaatgttcctcaaagagctatggatgccagaaattcagcccgacggcgttttgccgcaggatgatagctttatggctaagccggcgattaatctggcgaaatacaaagcggcggcggggaagcaaaccatactgctggattatagtcgcgcagaagtgaacgagatgcagatcctcaaacaagctgatgtggtgatgctcaattacatgctgccggagcagttcagtgcggcaagctgtcttgccaatctgcaattttatgaaccgcgcactattcacgacagcagtttaagtaaagcaatccacggcattgttgccgcacgctgtggcctgctgacccaaagttatcagttctggcgcgaggggactgaaatcgatcttggtgctgatccgcatagttgtgatgatggtatccatgctgccgcaactggcgctatctggctgggggcgattcagggttttgccggggtgagcgtgcgtgacggtgaattgcatctcaatccggcgttacctgagcagtggcaacagttgtctttccctctgttctggcagggctgcgaattacaggtcactcttgacgcgcagcgtattgcgattcgaacttctgcgcccgttagtctgcgtttgaacggtcagcttataaccgtggctgaagaatctgttttctgtttgggtgattttattttgcccttcaatgggaccgctaccaaacatcaggaggatgaatgaaactgcaaggggtaattttcgatctggatggtgtaatcaccgataccgcgcatctgcatttccaggcgtggcagcagattgccgctgaaattggcatcagcattgatgcgcagtttaacgaatccctaaaagggatcagccgcgatgagtctctgcggcgcattctgcaacacggggcaaagagggcgactttaacagccaggagagggcgcaactggcgtatcgcaaaaatctgctctatgtccacagtctacgcgagttgacggtcaacgctgttctacccggcattcgctctttgctggcagatctccgtgcacagcagatcagcgttgggctggcttctgtctccctgaatgcgccgacgattttagcggcgctggagctgcgcgagtttttcaccttctgcgcggatgcttcccaacttaaaaacagcaaaccggacccggaaatctttctcgccgcctgtgcagggctgggcgtgccgccgcaggcatgtatcggcattgaagatgcgcaggcgggcattgacgccattaacgccagcggtatgcgcagcgtggggatcggcgcgggcttaaccggggcgcaattactgttgcctagtacggaaagtctcacctggccgcggttaagcgccttctggcaaaacgtataacaaaggaatcaacatggctcagcttagcttacaacatattcaaaaaatctacgataaccaggtgcatgtggtgaaggacttcaacctggaaattgccgataaagagttcatcgtgtttgtcggcccgagcggctgcggtaagagcaccaccctgcgcatgattgccgggcttgaggagatcagcggcggcgatctgttgatcgacggcaaacgaatgaatgacgttccagccaaagcacgcaatatagcgatggtgttccagaactacgcgttgtatccgcatatgacggtttacgacaacatggcgtttggtctgaagatgcaaaaaatcgccaaagaggtgattgatgagcgggtgaactgggcggcgcaaattctcggcctgcgtgagtacctgaaacgtaagccgggggcgctttccggcgggcaacgtcagcgagtggcgcttgggcgggcgattgtacgcgaagcgggcgtgtttttaatggatgaaccgctctctaaccttgatgccaagctgcgcgtgcaaatgcgcgcagagatcagcaagctgcatcagaaactgaacaccaccatgatctacgtgacccacgatcagaccgaagcgatgaccatggcgacgcggattgtgattatgaaagacgggattgttcagcaagtaggtgcgccgaaaaccgtttataaccaacccgcgaatatgtttgtttccggatttattggaagtccagcgatgaattttattcgcggcacgatcgatggcgataaattcgttacggaaacgcttaaattaaccattcccgaagagaaattagcggttctgaaaacacaggaaagtttgcataagcccatcgtgatgggaatacgaccggaagatattcatccggacgcgcaagaggaaaataacatttccgccaaaattagcgtggcagaattaaccggtgcggaatttatgctctacaccacggttgggggcacgagttaaacggttgggggcacgagttagtggtccgtgctggtgcgttaaatgattatcatgcaggagaaaatatcactattcattttgatatgacgaaatgtcatttctttgatgcagaaacggaaatagcaattcgctaaatacagggggaaggcattcccccaggataatacaaggaacaataatgaaaaagttattaccctgtaccgcactggtgatgtgtgcgggaatggcctgcgcacaggccgaggaaaggaacgactggcactttaatatcggcgcgatgtacgaaatagaaaacgtcgagggttatggcgaagatatggatgggctggcggagcctagtgtctattttaatgccgccaacgggccgtggagaattgctctggcctattatcaggaagggccggtagattatagcgcgggtaaacgtggaacgtggtttgatcgcccggagctggaggtgcattatcagttcctcgaaaacgatgatttcagtttcggcctgaccggcggtttccgtaattatggttatcactacgttgatgaaccgggtaaagacacggcgaatatgcagcgctggaaaatcgcgccagactgggatgtgaaactgactgacgatttacgtttcaacggttggttgagcatgtataaatttgccaacgatctgaacactaccggttacgctgatacccgtgtcgaaacggaaacaggtctgcaatataccttcaacgaaacggttgccttgcgagtgaactattatctcgagcgcggcttcaatatggacgacagtcgcaataacggtgagttttccacgcaagaaattcgcgcctatttgccgctgacgctcggcaaccacagcgtgacgccgtatacgcgcattgggctggatcgctggagtaactgggactggcaggatgatattgaacgtgaaggccatgattttaaccgtgtaggtttattttacggttatgatttccagaacggactttccgttagcctggaatacgcgtttgagtggcaggatcacgacgaaggcgacagtgataaattccattatgcaggtgtcggcgtaaattacagcttctgataatgggctaaattgccggatgcggcgcgagtactttatccgatctataaatgtaggccggataagatgcgctagcatcgcatctggcattcaggcaaggtagctggtatttatttcagcgtcatatgcgtggcaacggtaatattctgtggactcggttttccagaaattaagcggaataataactcgcagctttgttgacctaactcctgcgtcggaacatcgatgccgcccggtgcaggcgttaaaataaaactcagcgtttcattgctataacccaccaccgctaactgctgcggaatagcaatatttttctctgctgccgcacgataaatgctcattaatttcaggctgtcagtggcaaacaccgcctcaggcaacggactctggcttaataattgccgtgctgcttttaatgcagtttcatgggtataaccgccatcaacaatccattcatcacgcactgcaatattatgcgcagccaggctctgcttataaccattaacgcgatcaacgctaacatggacatcaagcggagcatgcaggcaggcaatattttgatgcccactttcaattaatgcatcggtcaacgcaatgctgtcgccaaaattatcggtatcgacagaataaacatgggcatattgaccttcaactttgccaatcaccaccaccggaatatcatatttatcgagttgggcaaaaaaactctcatccgctgggctactgagcataataatgcctttaatcattttctgcttaattttgctttcgcatttttgcagatcttctgccggattgtggctcgtttgtaatatcacgtcgaaaccttcttcttcagctttggcggtgatggcatgcaaaacttcagagaaaaacggattacccgccgtagttttggtgctacgggtagaaatcaccataatggcatcaaaaccgctagaggtcagcgcgcgggccagcttgtttggctgatactgtaattcttcaatgacccgtaacactttttcgcgcgcttccggggagatattagtttgcttattcagcacgcgacttacggtggatttacttacgcctgcaaccctggcaatatcataaatagtaggggacataggtcaggaactccgtccgaacgtgaatgctgcacatcttatggagttcgccggtcgatgacaacacgggcagttgataatcaatggcctggcccccacattcatatccttacgaatgattttttttctggtcttcagagcagcacaggacagcaatgaagcgacttaaaaatgaactcaatgcgctggtgaatcggggtgtcgacagacatctgcgcctcgctgtaaccggacttagccgcagcggcaaaacagcgtttatcaccgcgatggttaatcagttgcttaatattcacgccggagcacgtttgccgctgttaagtgcggtgcgtgaagagcgcctgctgggcgtgaaacgcattccccagcgtgactttggcattccgcgcttcacctatgacgaagggctggcgcagttatatggcgatccacccgcctggccaacgccaacgcgcggcgtcagtgaaatccgcctggcgctacgttttaaaagcaatgatagcctgctacgccactttaaggatacctccacgctgtatctggaaattgtggattatcccggcgaatggttgctcgacctgccgatgctggcgcaggactatttaagctggagccgccagatgacgggcttactcaatggtcagcgcggagaatggagcgcgaaatggcgaatgatgagcgaagggctggacccgctagcgcctgccgacgaaaaccggctggcggacattgccgccgcgtggaccgattatctccaccactgtaaagagcaggggctgcactttattcagcctgggcgctttgtcttgccgggagatatggcaggtgcgcccgcgctgcaattcttcccgtggccggatgtcgatacctggggcgagtccaaactggcgcaggccgataagcataccaatgccggaatgctgcgcgagcgctttaattattactgcgagaaggtggtgaaggggttctataagaatcattttctgcgctttgaccgccagattgtgctggtggattgcctgcaacctctcaacagtgggccacaggcatttaatgatatgcgtctggcactgacgcagctgatgcaaagttttcactacgggcagcgtaccctgttccggcgtttgtttagcccggttatcgataagctattgtttgctgccactaaagcggaccatgtgaccatcgatcagcacgctaatatggttagtttactgcaacaactgattcaggatgcctggcaaaatgcggcgttcgaagggatcagcatggactgcctggggctggcgagtgttcaggcgaccaccagcggcattattgatgttaacggtgagaaaatcccggcgctgcgtggtaatcgacttagcgatggcgcaccgctcactgtttatcctggcgaagttcccgcacgtttgcctggtcaggcgttctgggataagcaaggcttccagtttgaggcatttcgtccgcaggtgatggatgtcgacaaaccactaccgcatattcgtcttgatgctgcgctggaatttttaataggagataaattgcgatgaccgaaccgttaaaaccacgtattgatttcgacggtcctctggaggtcgatcagaatcctaaattcagggcgcagcagacctttgacgaaaatcaggcgcaaaattttgccccggccacgctcgacgaagcgcaggaagaagaggggcaagtcgaagcggtaatggacgcagcgttacgtccgaaacgcagcctgtggcgcaaaatggtgatgggagggctggctctgtttggcgcaagcgttgtcgggcagggtgtacagtggacaatgaatgcctggcaaacccaggactgggtggcgctgggtggatgtgccgctggggcattgattatcggcgctggcgtaggttctgcggtaacagagtggcggcgcttatggcgcttgcgacagcgcgcccatgaacgcgacgaagcgcgtgatttattgcatagccacggcacgggcaaaggccgcgcattttgcgaaaaactggcgcagcaggcgggtattgatcagagccatccggcgctgcaacgctggtatgccagtatccatgaaacgcaaaacgaccgtgaagtggtcagcctgtatgcgcatttggtccagccagttttagatgcccaggcgcggcgcgaaatcagccgtagcgcggcggaaagtacgttgatgattgcggtcagcccgctggcgttggtcgatatggcgtttatcgcctggcgcaatctgcgtttaattaatcgcatcgccacgctgtatggcattgaactggggtattacagccgtttgcgtctgtttaagctggtattgctgaatatcgcttttgccggagccagcgaactggtgcgcgaagtggggatggactggatgagccaagatctcgctgctcgtttgtctacccgcgcagctcaggggattggtgcaggacttctgacggcacgactcgggattaaagctatggagctttgccgcccgctgccgtggattgacgatgacaaacctcgcctcggggatttccgtcgtcagcttatcggtcaggtgaaagaaacgctgcaaaaaggcaaaacgcccagcgaaaaataatgcaatatcgggtgctgaccggatatctttacgccgaagtgcccgtttttccgtctttgtgtcaatgattgttgacagaaaccttcctgctatccaaatagtgtcatatcatcatattaattgttcttttttcaggtgaaggttcccatgcgtctggaagtcttttgtgaagaccgactcggtctgacccgcgaattactcgatctactcgtgctaagaggcattgatttacgcggtattgagattgatcccattgggcgaatctacctcaattttgctgaactggagtttgagagtttcagcagtctgatggccgaaatacgccgtattgcgggtgttaccgatgtgcgtactgtcccgtggatgccttccgaacgtgagcatctggcgttgagcgcgttactggaggcgttgcctgaacctgtgctctctgtcgatatgaaaagcaaagtggatatggcgaacccggcgagctgtcagctttttgggcaaaaattggatcgcctgcgcaaccataccgccgcacaattgattaacggctttaattttttacgttggctggaaagcgaaccgcaagatagccataacgagcatgtcgttattaatgggcagaatttcctgatggagattacgcctgtttatcttcaggatgaaaatgatcaacacgtcctgaccggtgcggtggtgatgttgcgaagtacgattcgtatgggccgccagttgcaaaatgtcgccgcccaggacgtcagcgccttcagtcaaattgtcgccgtcagcccgaaaatgaagcatgttgtcgaacaggcgcagaaactggcgatgctaagcgcgccgctgctgattacgggtgacacaggtacaggtaaagatctctttgcctacgcctgccatcaggcaagccccagagcgggcaaaccttacctggcgctgaactgtgcgtctataccggaagatgcggtcgagagtgaactgtttggtcatgctccggaagggaagaaaggattctttgagcaggcgaacggtggtagcgtgctgttggatgaaataggggaaatgagtccacggatgcaggcgaaattactgcgtttccttaatgatggcactttccgtcgggttggcgaagaccatgaggtgcatgtcgatgtgcgggtgatttgcgctacgcagaagaatctggtcgaactggtgcaaaaaggcatgttccgtgaagatctctattatcgtctgaacgtgttgacgctcaatctgccgccgctacgtgactgtccgcaggacatcatgccgttaactgagctgttcgtcgcccgctttgccgacgagcagggcgtgccgcgtccgaaactggccgctgacctgaatactgtacttacgcgttatgcgtggccgggaaatgtgcggcagttaaagaacgctatctatcgcgcactgacacaactggacggttatgagctgcgtccacaggatattttgttgccggattatgacgccgcaacggtagccgtgggcgaagatgcgatggaaggtagcctggacgaaatcaccagccgttttgaacgcagcgtattaacccagctttatcgcaattatcccagcacgcgcaaactggcaaaacgtctcggcgttagtcataccgcgattgccaataagttgcgggaatatggtctgagtcagaagaagaacgaagagtaagcgcgaatatgcctgatggtgcaacaccatcaggcatattaaattatgctttcagtacagccagagctgcttcgtaatccggctcggtggtgatttcatccaccagctggctgaaaatcacattgtcattttcgtcaataaccacaacggcacgcgctgccagacctttcagtgggccatcagcaattgccacaccgtaagcttgcagaaattcagcgttacggaaagtggagagggtgataacgttgttcagaccttctgcgccgcagaaacgagactgggcgaacggcagatcggcagagatacacagcacaacggtgttgtcgatctcagttgccagttggttaaacttacgtacacttgcggcgcaaacaccggtatcaatactcgggaaaatgttcagcactttgcgtttacccgcaaactgaccgagggtgacgtcagacagatcttttgccacgagagtaaaagtctgcgctttgctacccgcctgcgggatggaattggcgactgtaaccgggttgccctggaaatgaacggtttgactcatgattatctttcctgtttacatatagttaacgtcacacctagtttatgctaactgtcaataacacagcaaacgctattacagggtctccttacaacaactgtcaacgcagtttgtaattaaaagattaacccatatctggtgaatgaaacagtgatgaaccttctgccagatcaataaatcagaaaaatttaatgatatgacagaaggatagtgagttatgcggaaaaatcaggcaacgttacgcgtatgaccggcaagctgggccagcgcatcgttattttcgatggtgatgtatttacctttgactgccagcatgccgcttttctggaagcgacccagcagacggctgatggtttctaccgtcaggcccagatagttaccgatatcgccacgagtcatcgtcaggcggaattcacgaggggagaagccgcgttgggcaaaacgacgggacaggttgtagatgaatgcagccagacgttcctcggcatttttcttgctcaacagcaggatcatgtcctgatcgcctttgatttcaccgctcatcagacgcatcatctgctgacgcagattcggcattttaccggacaaatcgtccagcgtttcgaacgggatttcacataccatgctggtttccagcgcctgcgcgaagctcgggtgatggccgctgccgatggcgtcaaatcccaccaggtcgcctgctaaatggaaaccagtgatttgctcgtcgccttgctcagtgatggtataacttttaatcgtaccggagcggatggcataaaggcttttaagttcatcaccagccttaaacagcgtctggcctttctgaataggcttcttccgctcaatgatattatcaagctgatcaagctcatgttcgttgagtgtgaacgggatgcaaagctggctgatgctgcaatcctggcaatggatagcacaaccgccagactgaatgcgccgtataattcgcttttccgggatcataggtctgctcaagccgtaattgatatttgtcaattttaacatctttttagggagcaagtaagtctaagcaaaccttaacagcagagaattccgatattagatgtaaatatatgtctatctatttgaaaacccttaagttgttaagggtaactttacataaaagtgtgaacaagctggcacaaattgtttaatgtttacagcaaaagataaccttcatggcgcaataaccactcttttcgctgaactccgcctgcatatccggtcatggtgccgtttcggccaataacccgatggcaaggtacgacgatgctgatgggattgcttccgtttgccgcaccaacggcacgcgccgcgccaggacggcccaattgctcagccagttggccgtaatgcattacctgcccgcaggggatagtgcgtagtgttttccagacttcgcgctgaaatggcgtcccccccgtagcagtgggaagcgtatcaataatgctaagattaccggcaaaatattcacgaagcttgtcgcttaaaccgcctggattggtggcagaaatgcgctcatagccttctttgcgataatggatgtccagcagctgcaccatgcgttcgctgtactcttcccattcaaccgcccgcaggcgaaattgctcatcgcaaatcacccacagtggacccagtggcgtggcaattttttcttcaagtaatctcagcatccgttctctcttaagacaaacgtgggtaaatacccggacctatcggcagaccgacaagataccacgccagcacatcgcagccatactatgcagaaacaatgctgtcgatggctgcttttgcgtcagactgtgctttcgctgccatttccggaccgtatgcgatcccttcggcgaagacaaatttcacatcggtaatgccgataaagccgaggaacgtggacagatacggcgtcaccaggtccgttggtccatctttgtggatcccgccgcggctggtaataacgatggcttttttacccgttaccagaccttccggaccgttctcggtatagcggaaagtaacgcctgcgcgggcaaccaggtcaaaatagtttttcaactgagtcgagatgttgaagttatacatcggtgccgcaataacgataacgtcgtgggctttcagctcggcaatcaactcatcggaaagtgccagagcttcctgctgacgcggagtcagcggcgcatcgctcggacgcagagcgccaaccagttcgccatccagtaccggaatcggatttgcagccaggtcgcgaacggtgatttcatcagcggagtgcttttcgcgccattgttcaacaaaataatcggacaactgattagactgagagtaccctgccaggatgctggatttaagaactaataccttgctcatggtgtttccttatagatgtttgaatgggcgatgccccgttgcttgttgacactttattcacaatcctgccacagagatagcgcaataaatcgaagcctatgttcgaatttattgaacaacgcatagaaagccgcgatgtggtactctatatctatcatttaaaagaaaattaatcaggcagactactgcccactaacgttatgacagaacaacaaaaattgacctttacggccttgcagcagcggctggattcgctgatgctgcgtgacagactgcgtttttctcgccgtctgcacggcgtgaagaaggttaaaaatcctgatgcacaacaggccattttccaggagatggcgaaagagattgaccaggcggcagggaaagtcctgctgcgtgaagcggcacgaccggaaattacttatcctgacaatttaccggttagtcagaaaaaacaggacattctcgaagcgattcgtgatcaccaggtggtgatcgtcgccggggaaacgggttctggtaaaacgactcagttaccgaaaatctgtatggagctggggcgcgggattaaaggactgatcggccatacccagccgcgtcgtctggcggcaagaacagtggcgagccgtattgcggaagagctgaaaacggagccgggcggttgcatcggttacaaagtgcgtttcagcgatcacgtaagtgataacacgatggtcaagctgatgaccgacggtatcctgctggcggagatccagcaagaccgcctgctgatgcagtacgacactatcattattgacgaagcgcacgaacgcagcctgaatatcgattttttgctcggctatttgaaagagttgctgccgcggcgtcctgacctaaaaatcattatcacttccgcgactatcgacccggaacgctttagccgccactttaataatgcgccgattattgaagtctccggtcggacctatccggtggaagtgcgctatcgcccgattgttgaagaagccgatgacaccgagcgcgatcagttgcaggcgatttttgacgccgtagacgaactgagtcaggaaagccatggcgacattctgatctttatgagcggcgagcgggaaatccgcgataccgccgatgcgctgaacaagctgaacttacgccataccgaaatcttgccgctttatgcgcggcttagcaacagcgaacaaaatagggtattccagagccacagcggacggcgcattgtgctggcgaccaacgtcgcggaaacgagcctgaccgtaccggggattaaatacgttatcgaccccggtacagcgcgtatcagccgctacagctatcgcaccaaagtgcagcgtttgccgattgagccgatttcccaggcgtctgccaatcagcgtaaaggccgctgtggtcgtgtgtccgaagggatctgtattcgtctctattccgaagacgatttcctcagccgcccggagtttaccgatccggagattctgcgtaccaacctggccagcgttattttgcagatgaccgcgctggggctgggcgatatcgctgcgttcccgtttgtcgaagcaccggataaacgcaatatccaggatggcgtgcgtctgctcgaagagctgggcgcgatcaccactgatgaacaggccagcgcctataaactgacgccgctcggtcgccagctcagccagttgcctgtcgacccacgtctggcgcgtatggtgctggaagcgcaaaaacatggctgcgtgcgtgaggcgatgattatcacgtccgcgctctccattcaggatccgcgcgaacgtccgatggacaaacagcaggcaagcgacgaaaaacatcgtcgcttccacgacaaagagtctgactttctcgcgtttgtgaatctgtggaattatcttggcgagcagcaaaaggcgctttcttccaacgccttccgtcgcctgtgtcgtaccgattatctcaactatctgcgcgtgcgcgaatggcaggatatctacacccagttgcgtcaggtggtgaaagaacttggcattccggttaacagcgaaccggcggagtatcgcgaaattcacattgcgttgctgaccggtttactttcccatatcggcatgaaagatgccgataaacaagaatataccggcgcacgtaacgcgcgtttctccatcttccccggttctggtttattcaaaaaaccgcctaaatgggtaatggtggcggaactggtagaaaccagccgcctgtgggggcgcattgctgcgcgtatcgacccggaatgggtggagccagttgctcagcatttgattaaacgcacctacagcgaaccgcactgggaacgggcgcagggcgcggtgatggcaacggaaaaagtcactgtttatggtttgccgattgttgccgcgcgcaaggtcaactacagccagatcgatccggcgttatgtcgtgaactctttattcgccacgcgctggtggaaggtgactggcagacgcgtcacgcattcttccgtgaaaacctgaaactacgggcggaagtagaagagctggaacacaaaagtcgtcgccgcgatattctggttgatgacgaaacgttgtttgagttctacgaccagcgcatcagccacgatgtaatctccgctcgccacttcgacagctggtggaaaaaagtcagccgcgaaacgcctgatttgctcaactttgaaaaaagcatgttgatcaaagagggcgcagaaaaaatcagcaagctggattacccgaacttctggcatcagggcaatctcaagctgcgtttgagctatcagtttgagcccggcgcggatgctgacggtgtgaccgtacatattccgctgccgttacttaaccaggttgaggaaagcgggtttgaatggcagatccccggtctgcgccgcgaactggtgattgctctgattaaaagcttgccgaaaccggtacgccgtaattttgtacccgcgccaaactatgccgaagcgtttttaggccgcgtcaaaccgctggagttaccgttgctcgacagccttgagcgcgagttacggcggatgaccggcgttaccgttgaccgcgaagactggcactgggatcaggtgcccgatcacctgaaaattaccttccgcgtggtggatgacaaaaacaagaagctaaaagaagggcgcagcctacaagatctgaaagatgcgctgaaaggcaaagtgcaggaaacgctatctgcggtggcggatgacggtatcgagcagagcggcttacatatctggagttttggtcagctgccggaaagctacgaacagaagcgtggcaactacaaagtgaaggcgtggccggcgctggtggatgagcgcgacagtgtggcgatcaaactgtttgataacccgctggagcaaaagcaggcaatgtggaacggtcttcgccgtctactgctgctgaatattccaagcccaatcaaatatttacatgaaaagttaccgaacaaagccaagctgggactgtactttaacccgtatggcaaagtgctggagctgatcgacgactgtatctcctgcggtgtggataaattgatcgacgccaatggtggcccggtctggacggaagaaggctttgctgcgctgcatgaaaaagtgcgtgccgaactgaacgacacggtggtggatattgcgaagcaggtcgagcaaatccttacggcagtgttcaatatcaacaaacgtctgaaagggcgggtggatatgaccatggcgctggggctttctgacattaaagcgcagatgggcgggttggtatatcgcggttttgtcactggtaacggcttcaaacggctgggcgacacgctgcgatatttgcaggcgattgaaaaacggctggaaaaactggcggttgatccacatcgcgaccgtgcgcagatgctgaaagtcgaaaacgtccagcaggcgtggcagcaatggatcaacaaactgccgcccgcacgtcgtgaggatgaagacgtgaaagagatccgttggatgatagaagagttgcgcgttagttacttcgctcaacaacttggtacgccttatccgattagtgataagcgtattttgcaggcgatggagcagattagcggttaaccctgctatttgcctgataaagaaaaaacccggtaagcatttagcgccgggttttttattaattctaaaacggtaagggtaaaaattcaggaattcagaaaaatacaattctctgctgcaagatgaataatgtttatctacagcatttccttaaaagatatgtcaggcttgcggagtggcggttaaggacatacgatttcctcctttcagagtgctccgcttctcactattatctcacgcagtattcttaagggaacgataaggaggaaccatgaacattaccccgtttccgacgcttagcccggcaactatagatgccataaatgttatcggacagtggctggcgcaggatgatttctccggtgaggtgccgtatcaggccgattgcgtgatccttgcaggcaatgcggttatgccgactatcgatgcggcatgtaagattgcccgcgatcagcaaattcctttactgattagtggtggtatcggtcacagcacaacttttttgtatagcgccatcgcacagcatccgcactacaacactatccgcaccactggcagagcagaagcgaccatcctggcggatatcgctcatcagttctggcacattccgcatgaaaaaatctggattgaagaccagagtacaaactgcggtgaaaacgcacgctttagcatcgcgctattgaatcaggccgtagaacgagttcatacggctatcgttgttcaggaccccaccatgcagcggcgcacgatggcgacgttccgccgtatgactggggacaatcccgatgcaccacgctggttaagttatcccggattcgttcctcagttaggaaataacgcagacagtgtaatctttattaatcagttacaaggattatggccagttgagcgttatctcagtctactcactggcgagctgccgcgtttacgcgatgatagcgatggctacggtccccgcgggcgagattttatcgttcacgttgattttccggcagaagtcatccatgcatggcaaacgctgaaacatgatgcggtgctcatcgaggcgatggaaagtcgcagcttacgttaaaaattgcccgtttgtgaaccacttgtttgcaaacgggcatgactcctgacttttatttctgccttttattccttttacacttgtttttatgaagcccttcacagaattgtcctttcacgattccgtctctctgatgattgatgttaattaacaatgtattcaccgaaaacaaacatataaatcacaggagtcgcccatgagtgtacccgttcaacatcctatgtatatcgatggacagtttgttacctggcgtggagacgcatggattgatgtggtaaaccctgctacagaggctgtcatttcccgcatacccgatggtcaggccgaggatgcccgtaaggcaatcgatgcagcagaacgtgcacaaccagaatgggaagcgttgcctgctattgaacgcgccagttggttgcgcaaaatctccgccgggatccgcgaacgcgccagtgaaatcagtgcgctgattgttgaagaagggggcaagatccagcagctggctgaagtcgaagtggcttttactgccgactatatcgattacatggcggagtgggcacggcgttacgagggcgagattattcaaagcgatcgtccaggagaaaatattcttttgtttaaacgtgcgcttggtgtgactaccggcattctgccgtggaacttcccgttcttcctcattgcccgcaaaatggctcccgctcttttgaccggtaataccatcgtcattaaacctagtgaatttacgccaaacaatgcgattgcattcgccaaaatcgtcgatgaaataggccttccgcgcggcgtgtttaaccttgtactggggcgtggtgaaaccgttgggcaagaactggcgggtaacccaaaggtcgcaatggtcagtatgacaggcagcgtctctgcaggtgagaagatcatggcgactgcggcgaaaaacatcaccaaagtgtgtctggaattggggggtaaagcaccagctatcgtaatggacgatgccgatcttgaactggcagtcaaagccatcgttgatagtcgcgtcattaatagtgggcaagtgtgtaactgtgcagaacgtgtttatgtacagaaaggcatttatgatcagttcgtcaatcggctgggtgaagcgatgcaggcggttcaatttggtaaccccgctgaacgcaacgacattgcgatggggccgttgattaacgccgcggcgctggaaagggtcgagcaaaaagtggcgcgcgcagtagaagaaggggcgagagtggcgttcggtggcaaagcggtagaggggaaaggatattattatccgccgacattgctgctggatgttcgccaggaaatgagcattatgcatgaggaaacctttggcccggtgctgccagttgtcgcatttgacacgctggaagatgctatcagtatggctaatgacagtgattacggcctgaccagtagtatctatacccaaaatctgaacgtcgcgatgaaagccattaaagggctgaagtttggtgaaacttacatcaaccgtgaaaacttcgaagctatgcaaggcttccacgccggatggcgtaaatccggtattggcggcgcagatggtaaacatggcttgcatgaatatctgcagacccaggtggtttatttacagtcttaatgagtgaaagaggcggaggttttttcctccgcctgtgcgcgtcagagtttagcgaatttttcgagggtgcgaataagctgtgtgacgaagccatattcgttatcgtaccaggcgaccgttttcaccagttgtaaatcgcccacggcggtaatttccgtttgcgtggcatcaaacaccgaaccgaaatggctgccaatgatatcggaagagactatttcttcatcggtataaccaaatgactcgttattggtggttgcttgtttaagtgcgttattcacctcttcggcagtcacttttttccgagaatcgataccagttcagtgaccgaacctgttttcaccggcacgcgttgcgcatgacctttcagtttgccgctcagttccgggatcaccagaccaatggcttttgccgcccccgtagtgtggggaatgatattttctgccgctgcgcgtgaagcacgtaaatctttaccacgcgggccatccaccagtgactgggtgccagtataggcatgaatggtcgtcatcgtgccgacttctatcccgaaactgtcatgcaaggctttggccatcggcgcaagacagttagtggtgcatgacgccacggaaacaatggtgtcgttgccatccagagtgtcgtcattgacgttataaacgatagttttcatttcaccggcaggggcggaaatcaacaccttcttcgcaccagcatcaagatgcgcctgcgatttctcggcggaggtataaaagccagtacattcgacaatgatttctgcacctttcgctttccacggaatatttttagcctctttttcggcgtaaaccgcgatacttttcccatcaacgataagtgaatcttccgtaaaatcaacgctccaggggaatggtccgtagtttgaatcatgtttcagcaggtaggcgagaatttatggggaagtgagatcattaatagcgacaacgtctatgttgcttttgacttcaagtaatcgacccaacaccagtcgaccgatacgaccaaaaccgttaataccaactttactcatggttttctcctgtcaggaacgttcggatgaaaattgatcctttccaagcttagaccaggatggcgggatgggcaatctccattctcacagtgaaacgtaacgtactgaaaacgggtgaacaatatttaatgaaattttgagaaaagcccgttatgttaacggaaaattatgttaaagcaggaaatgttatggaaaataaatatagtaggttacaaatcagcattcactggctggtctttttactggttatcgcagcgtattgcgcaatggagtttcgtggtttcttcccacgtagcgatcggccactcatcaacatgattcatgtttcctgtggcatcagtattctcgtgctgatggtcgttcgtcttttgttaaggctgaaatacccaaccccgccgattatacctaagccaaaaccgatgatgacgggactggcgcatttgggacatttggtgatttatctcctgtttattgcgctgccagtgattggtttggtgatgatgtataaccggggcaacccgtggtttgcgtttggtttgacgatgccttacgctagtgaggccaatttcgaacgggtagatagcttaaagagctggcatgaaacgctggcgaatctgggatattttgttatcgggttgcacgctgcggctgcactggcacaccactatttctggaaggacaacacacttctacgcatgatgccgcgtaaacgttcctgaaggatatttaaagaaaacgcctgtactaaaaccgacccgtggtacaggcgaagaatacgggtctacatcggaagcgcctattatatttatttgtatgataaataaaaccataatccttgcccatacgtccatctggcttatttttaatcaattcacccgatctttgatctcatcaacggtatcaaaataaaccagcgtataacgttcaaatcgaacataagattcgataaaccatggaggttatatgaaaaaactggcacttattttgtttatgggaacgcttgtttccttttatgccgatgccgggcgcaaaccctgttctggtagcaaaggggggatcagtcactgtacggcaggcggcaaatttgtctgtaatgatggttctattagtgcaagcaaaaaaacatgcactaactgaagtgtaaaaggggtgccatgagaaaatgaatctgctagtcaaatgcgcggggaaaatccccgcgcttgcccttacctggacgtgcaggccatgagcgcagcaacctccttatcaccgtcccggaaccgcagttcgtagagcgtttgtcgggtcaggagtgtgaatgtcagaatcgtaatgcagataatgagcagacacaccaccagagggttgtgcttcatagcctttctccttgccggatggcgggtaagaggctaagatctgaattgctaggttcattcgttggcctcggttgatagaaatatcggtcggggccttcgtctttctgattcccggttagcctgaaaacagaaagtctcaggcacccgcaggcatcctatgaggtttccttagggacgaaaataatcacttcacgaaattgcgtgctgttttccagaatttttcgtcattcgggttagccagtttagccattcgttactctcttcattccaatagcattaattttctatgcaataattgttgtaaaaatgtgacgcaaagaggtttttggtcataagtaattaccgtcaagtgccgatgactttctatcaggagtaaacctggacgagagacaacggtaatgaatacaactcccagtcagcgattaggttttttgcatcacatcaggttggttccgttatttgcctgcattctaggcggtatcttagttctattcgcattaagtagtgccctggctggctatttcctctggcaggccgatcgcgatcagcgtgatgttactgcggagattgagattcggaccgggttagcgaacagtagtgattttttgcgtagtgcccggatcaatatgattcaggccggggctgcgagtcgtattgcggaaatggaagcaatgaagcgaaatattgcgcaagccgaaagcgagattaaacagagccagcaaggttatcgtgcttatcagaatcgaccggtgaaaacacctgctgatgaagccctcgacactgaattaaatcaacgctttcaggcttatatcacgggtatgcaacctatgttgaaatatgccaaaaatggcatgtttgaagcgattatcaatcatgaaagtgagcagatccgaccgctggataatgcttataccgatattttgaacaaagccgttaagatacgtagcaccagagccaaccaactggcggaactggcccatcagcgcacccgcctgggtgggatgttcatgattggcgcgtttgtgcttgccctggtcatgacgctgataacatttatggtgctacgtcggatcgtcattcgtccactgcaacatgccgcacaacggattgaaaaaatcgccagtggcgatctgacgatgaatgatgaaccggcgggtcgtaatgaaatcggtcgcttaagtcgtcatttacagcaaatgcagcatagtctggggatgacagtagggactgttcgacagggcgcggaagagatttatcgtggcaccagcgaaattagtgctggcaatgcggacctgagttctcgcaccgaagaacaagcggcggctatcgaacaaactgccgccagcatggagcaactcactgcgacggtgaaacagaatgcggataacgcgcatcatgccagcaaactggcgcaagaggcttctattaaagccagcgatggcgggcagacggtttccggtgtagtaaaaacgatgggcgctatctccacgagtagcaagaaaatttctgagatcaccgccgtcatcaacagtattgctttccagacgaatattctggcactgaatgctgccgttgaagccgcgcgagcgggtgagcaagggcgtggatttgccgttgtcgccagcgaagtacggacactcgcaagtcgcagcgctcaggcggcgaaagagattgaaggcttgatcagtgaaagtgtcaggttaattgacctggggagcgatgaggtggcaacggccgggaaaaccatgagcactattgttgatgccgtcgcgagtgtcacacatatcatgcaggaaatcgccgccgccagcgatgaacaaagtagaggcataacgcaggttagccaggcgatttctgaaatggataaggtgacgcaacagaatgcttctctggtagaagaggccagtgcggcggcggtgtcccttgaagaacaggcggcacgattaactgaggcggtggatgtattccgtctgcacaaacattctgtgagcgcagaacctcgcggagcgggtgaaccagttagtttcgctacggtgtgaaaatgttcaaggagggatcgacagatcccttcacctttcagaacggcatactttttcgaatagcgttaatcatcaactggcaaccagaagagaacgtcgcatctacgcgggtcagtattccaatcggttcgcctgcaccatgtcccggaacaggcagggccaccagcgtggcatgacgcaggtcgtcttttacagcgccagaagggacaaaccacacgtaatcgtattcaaccgtaagttgacgagataggctagcagacagcgtttcgatacaaccgctaggaattttacagccctggctctgcactaatgcatcactatgctggcgtggcgcagtgccttctggacttacaacgaccggccattccagcacccggcttagcgttacgttctcctgaagtagcgggtgattagggcggacaaccagcttcaagctttcaagaaacagcagttcgtaattaagcccggtcatcagttcaggatcactcatccgaccaatgccgatatcgatttccccggtttttaaacccgccagaatcatagggttactcattgtcgcaacttgcaaggtcgtctctttttgttgctgatgaaactgacctataacgctaggtaatatccccagtgccgcagtaggtagtgcaccaaccctgacgacatcattattaagaccttctttacgatgaaggctccgtccggcagtgttgatggcgtcaagaactctgactgcatgcgttaaaaattgttcgccgggtaaggtaagttgcgccccctgacgaccacgctcaaacaagcgagcgccagtcagctgctccagttcattcaatgtcttagagagcgcaggttgactcaaattaagggtttcagccgcgcgccccaaagttccttgttgtgcgacagctacgaatgtatgaaggtggcgcaaacggatgcgctgactaaacagactatttttttccataagcgatgttaaaaacgaagcggtgtcgctgacaagtgaagttgtttgattatgataacttgattgcaaaatattattaacaattaaagcaattatgttacagcaaaatggataatattgatgttttcgcggcgagatcacagtttgtaaattcttcccgcaagagtgaatgcggttacctacactccagattactgaccactggaggcagacactatggcgaacagcatcacggcggatgagattcgggaacagtttagccaggcaatgagtgccatgtaccagcaagaagttccgcaatatggcacgctgctggaactggtagctgatgtgaatctggctgtgctggaaaacaatcctcaactgcacgaaaaaatggtaaatgcagacgagctggcgcgactgaatgttgaacgtcatggggcgattcgcgttgggactgcacaagagcttgctactcttcggcggatgtttgccattatggggatgtacccggtgagctattacgatctcagccaggcaggggtgccggtacatagcacagcatttcggcccattgatgatgcttctctggcgcgtaatcccttccgcgtttttacctccttactccgccttgagcttatcgagaacgaaattttgcgccagaaagcggcggagattctgcgtcagcgcgatatcttcaccccacgttgtcgacaactgttagaggaatatgagcagcagggcggctttaacgaaacacaggcacaggagtttgtgcaggaagccctggaaacgtttcgctggcaccagagtgcaacggtagatgaagaaacctatcgcgcattgcacaacgaacatcggttgattgctgatgtggtctgttttcctggatgccatatcaaccacctgacgccacgtacgctggatattgaccgggtgcagagcatgatgcctgaatgcggaattgaacccaaaattctcatcgaggggccgccgcgccgcgaggtaccgattttactacgccagaccagctttaaagcactggaagagacggtgttgtttgcggggcagaaacagggcacgcataccgcgcgctttggtgaaattgagcagcgtggcgtggcattaacgccgaaagggcgacaactgtatgatgatcttctgcgtaacgctggaaccgggcaggataatctcactcaccaaatgcatttacaggaaaccttccgcacttttcctgacagtgagtttttaatgcgtcagcaagggttggcatggttccggtaccgtctgacgcctagcggtgaggcgcatcgtcaggcgattcatcctggagacgatccacagcccttaattgaacgtggttgggtagtggcgcaacccatcacctatgaagatttcttgcccgttagcgcggcggggatcttccagagtaatctgggtaatgaaacgcagacacgcagtcacggtaatgccagtcgcgaagcatttgagcaggcgttgggttgtccggttttggatgagttccagctttaccaggaagcggaagaacgcagtaaacgtcgctgtggtttgctttaaaatctgaccatccgcctttgcaaaaatttgcctgattttacaaacgaatcaggctcatcccatcgacataaaaaaaatgccgatttatgcatattctctcagttcaacaattggattattaataaatattgtctagagtgagcggtcataaataagcactttcttgccgctgaaaacgaccagcgcgggaccattcacaacaccagaaggactcactttcaggtatggatcgtagacgatttattaaaggttcaatggctatggccgccgtgtgcggtaccagcggcattgcttctcttttttctcaggcggcattcgcggcagattctgatattgccgacgggcaaacccagcgttttgacttctccattctacagagtatggcgcacgacttagcgcaaacagcgtggcgtggtgcgcctcgtccgttacctgacacgctggcgacaatgacgccgcaggcttataacagtattcaatacgacgccgaaaaaagcctctggcataacgttgagaaccgtcaactggacgctcagttcttccatatgggaatgggattccgtcgccgcgttcgtatgttttctgtagatccagcaacacatctggcgcgtgaaattcactttcgcccggagttgttcaaatacaacgatgcaggtgttgatacaaaacaattagaagggcaaagcgatctcggctttgccggttttcgcgtgtttaaagcccccgaactggcgcgccgtgatgtagtaagttttctcggcgcgagttatttccgcgccgttgatgatacatatcaatacggtttgagcgcccgcggcctggcgatcgacacttacaccgacagtaaagaagagttccccgactttaccgccttctggtttgatacggtaaaaccgggggcaactacctttaccgtttatgcgttgctcgatagcgccagcattactggtgcctataagttcactatccattgtgagaaaagtcaggtgattatggatgtggaaaatcacctgtatgcgcgcaaagacattaaacagctgggcattgcgccgatgaccagtatgttcagctgcggtactaatgaacgtcggatgtgcgatacaattcatccgcaaattcatgactctgatcgtctgtccatgtggcggggcaacggcgagtggatttgccgtccgctgaataatccgcaaaaattgcagttcaatgcttacaccgacaacaacccgaaagggtttggtttattgcaactggatcgtgacttctcccattatcaggacattatgggctggtataacaaacgcccaagtctgtgggtggaaccgcgtaacaagtggggtaagggcaccatcggcctgatggaaatcccaacaacgggcgaaacgctggataacattgtctgcttctggcagccagaaaaagctgtaaaagcaggtgatgagtttgcattccagtatcgtctgtactggagtgcgcaaccgcctgttcattgcccattagcgcgcgttatggcgacgcgtaccggcatgggcggtttcagcgaaggttgggcgccaggtgaacactatcccgaaaaatgggcgcgtcgttttgccgtcgatttcgttggtggtgatctgaaagctgccgcgccaaaaggcattgagccggtgattacgctttccagtggggaagcgaagcaaatcgaaattctctatattgaacccatcgatggttatcgtattcagtttgactggtatccgactagcgactccactgatccggtcgatatgcggatgtatctacgttgtcagggggacgctatcagtgaaacatggctgtatcagtatttcccgccagcgccggataaacgtcagtatgttgacgaccgcgtgatgagttaatcgttttttcttcggcaccttcttcgggaggtgccgtctggttaaacacgatcccgctcgcatttttccctaagttaaatgagtaatctgatggtgtgtatttcagatacaccttgtcagccactaacagggagtgcgtatgtttccagaataccgagatttaatatcccgtctgaaaaacgaaaatcctcgctttatgtccttgttcgataaacacaataaacttgatcatgaaattgccagaaaggaaggttccgacggtcgagggtacaatgcggaagtggtccgcatgaaaaaacaaaagctacagttaaaagatgagatgctcaaaatcctgcagcaggagagcgtcaaagaggtgtaaactttcctaagccgccagccaggcggcttttttaacaactgcatggattgactggagataagatgactgaaacgataaaagtaagcgaaagtcttgaattacatgctgttgcagaaaatcacgtcaaacctctttatcagttaatctgtaaaaataaaacctggttacagcagagcctaaactggccgcagtttgttcaaagtgaagaggacacgcgaaaaacggtgcagggtaatgtgatgttgcatcaacgcggctatgccaaaatgttcatgattttcaaagaagatgaacttatcggcgttatcagctttaatcgtattgaaccactgaataaaaccgctgaaatgggctactggctggacgaatctcatcaggggcaggggatcatttctcaggcgctgcaggcattgattcatcattacgcccagtctggtgaacttagacgcttcgtgatcaaatgtcgggtggacaatccgcaaagcaaccaggtcgctttgcgcaatggttttatccttgaaggttgcctgaaacaggctgagttcctgaatgatgcctatgatgatgtgaacttatacgcgcgtattatcgatagtcaataatcacaataaccctgccagcggcgttcgcgtaatgcgctcctcgccgttaatgacttttggaccacggacatgaaccgtgtcgccatcaaaggcttcaacgacggcgtggtcggttaactccacatggttttcaattatcaccgcacctgtaatacggctctcaccttgtatgacaacgtgctcgtcgagcagaatcggtccgccacgtaccacggcatttccgccaaccaagacatgatgttttaacacacaattaccttccacaatggcatattccgccacctggctactgtaatgaatcgtcggaatggcatcttcttctatgccagctttcacctgcgcgtgaccgtagactttagcgcaatcgcatagccagacattgttctcttcattaccttcaatactggcaaaatcaaaaacttcggcgcgatgttcaataaaagcataccggacgacggcatcgccataaatttgtgcctggtggacaatacggctggcgctaacccttgcgcgatcataaatttggagcaggagttgatggtcgggcgttaagccttgtgcggcgacgatcatagaatgttgatcaattaaggcgtgaccaaatattctacattgcccgtaaactaaactgtcatgaatggtgacgctgtcacttatatatgcaccctggctgatttcactattatcgatccagacgttatccgttgcgtaaacctctccccacagcacgctggtgccggtgatacgcgtattaccggaaatcaccgctccgccgaacgcaatagcattctggtcgtaaatccagcaatttccttcttgtgctaacaccgtttcgcgatcgatccagccgccagcggttcctgctatcacatcgttaaaatcgctaatggcgataatctgccgtaataacacattttttttagtgccatcttcctgataactaaaggctcgctgttcttcacttagacgatatttgcgcatagcgttttcccacaggtgacttactataaccgtagcaaattctgcggctctggctatgctcgagaaaattccataaaatgcatttcaaatatactttataaattaaacaaaatgagtaagaagatgcagagcgataaagtgctcaatttgccggcaggctactttggtattgtgttggggacgatagggatgggatttgcctggcgctatgccagccaggtttggcaggtcagtcactggttaggggatgggctggtgattctggcgatgatcatctggggattattgactagcgcatttattgcccgactcatacgctttccgcatagcgtgctggcggaagttcgccatccagtgctgagcagttttgtgagtttgtttccggcaacgacgatgctggtggcgattggttttgttccgtggtttcgcccactggcggtgtgcctgttcagttttggtgtcgtggttcagttggcttatgccgcctggcaaactgcgggattatggcgcggatctcaccctgaagaagctaccacgcctggactgtatctgccgacagttgccaacaactttatcagcgcaatggcctgtggtgcgttgggctacaccgacgccggtctggtgtttttaggcgcaggcgttttcagttggctaagccttgaaccggtgatcttgcagcgtctgcgcagtagcggagaattacccacggcactgcggacaagtctcggcattcagctcgctcctgcgctggtggcttgtagtgcctggctgagcgtcaacggcggcgagggtgacacgctggcgaaaatgcttttcggttatggactgctgcaactgctgtttatgctacgtctgatgccatggtatctctcccagccatttaatgctagtttctggagtttcagcttcggcgtatctgcactggcaaccaccggtttgcatctggggagtggcagcgataatggatttttccatacgctggcggtgccgctgtttatctttaccaattttattattgcaatactgctcatccgtacttttgcgcttctgatgcagggaaaattgttagtcagaaccgagcgcgccgttttaatgaaagcagaggacaaagaatgatcattcgtgacgaaaactattttactgataaatatgaattaacccgcacacactctgaagtactggaagcggtgaaagtggttaaaccgggtaaaacgctggatctgggctgtggcaatggtcgtaacagtctttacctggcagccaatggttatgatgttgacgcatgggataaaaatgccatgagtatcgccaacgtcgagcgcattaaatccattgaaaatctggataatttacacacccgagtcgttgatctgaataacctcacatttgatagacagtacgattttattcttagcactgtggtgctgatgttccttgaggctaaaaccatccccgggttgattgccaatatgcaacgttgcactaaacctggtggttacaacctgattgtggcggcgatggataccgctgattatccatgtaccgtcggcttcccgtttgccttcaaagagggagaattacgtcgatattacgaaggctgggagagggtgaaatacaatgaagacgtcggcgagctgcaccgcaccgacgccaacggtaatcgtattaaactgcgtttcgccacgatgctggcacgtaaaaaatgacccggtaagcacaaaacgcgtgaaaattccccacgctgagatgatttactgttcttcttttcggtaagcatattttttatcgaagggatgtgaaattaatcacagtagtcgaagtttttagcagcttaacttactgaaatttaagtactgatgattgacttagcccctttttcggcattgactatgtcgtctgaaaaggggctgaaaaatttattttcaccaacactttttttgccacaacacgaagcggcgctttttgctataacttagaaagtaatataatcatctcaggaaactattcatgcgtaccacaagttttgcgaaagttgcagctttatgcggcttattggctctgtctggttgtgcatctaaaatcacccagccagataaatattctggttttttaaacaattactctgatttaaaagaaacaaccagcgctacaggtaaacctgttttacgttgggtagacccgagttttgatcaaagcaaatatgacagcatcgtctggaacccaatcacttattatccggtaccgaaaccgagcacccaggtagggcagaaagttctggataaaattttgaactataccaacaccgaaatgaaagaagcgatagcgcagcgtaaaccactggttaccaccgctgggccgcgtagtctgattttccgtggggccattaccggtgtagataccagcaaagaagggctgcaattctatgaagtggttcctgttgcattagtggttgcggggacgcaaatggctacaggccaccgtaccatggatactcgcctctattttgaaggtgagctgattgatgcagcgactaataaaccggttatcaaagtcgttcgtcagggcgaaggtaaagacctgaataacgaaagtacgccaatggctttcgaaaatattaaacaagttattgatgacatggcgaccgatgccaccatgtttgacgttaacaaaaagtaattccagacgcgccatcgttagatggcgctttttatccggtgcgccgtaaaaccccatccttcagggcggggatataaggcgcggttttccacctgaccaggtgtttgctgttgttcaatgtattggcggatgacggatattggcgcacctccgcagctactggcaaaatagccaggactccacaaaacgcctttgtagtaatacctgaatgcaatatctggtcgatctcgtcgcagtcacctacccgatacgcctttgaggctgtttaccagactggatatcgccagtttgggaggatagttaattaacaaatggacgtgatctggttcgccatccatttcaaccagttcagcttcaaaatcagcacatacatttgaaaagtaagtgcgtagtttttctgtcgcgtcatggtcaaaaatctggcgtcggtatctggtgacaaagagcaggtgaacatgcatcaggaaaacacaatgccttccacgccggatatcggtttcttttttcacagaccaaagtatcatttgacctgtgaaacgattacaggcatttaaattccagttaagacccggtggtcaacaggagtgtgaaatgaggcgcttcgcaggcgcatgtcgtttcgttttcaatcgtgctctggcacgtcagaatgagaatcatgaggccggtaataaatacatcccttacgggaaaatggcttcctggctggttgagtggaaaaatgccactgaaacgcaatggcttaaagattctcccagtcagccattgcaacagagtctgaaagaccttgagcgggcttacaaaaacttcttccggaagcgggctgcttttccccgattcaaaaagcggggacagaatgatgcattccgctacccgcagggcgttaagctcgatcaggaaaacagccgtatttttctgccgaaactgggctggatgcgctaccggaacagccgtcaggtcacgggtgttgtgaaaaatgtcactgtcagccagtcctgcggtaagtggtacatcagtattcagacagaaagtgaagtaagtactccggttcaccctagtgcaagtatggtcgggctggatgctggcgtggctaaactcgccacgctgagtgatggcacagtctttgagcctgtaaacagttttcagaaaaaccagaagaagctggcgagacttcagcgacagttaagccgcaaggtcaaattcagcaacaactggcaaaagcagaaacgcaaaatacagcgactgcattcctgtatcgcaaatatccgcagggactaccttcacaaagtcacaacggccgtcagcaaaaaccacgcaatgatagtcattgaggatttgaaggtcagcaacatgagtaagagtgcagcgggtacggtcagccagccggggcgcaatgtccgggcaaaaagtggtttaaaccgtagcatactggatcagggctggtatgaaatgcgccgccagcttgcgtataagcagctctggcgtggcggtcaggtgcttgctgttccgccagcgtatacaagccagcgttgcgcgtactgtggtcatacagcgaaagagaaccgcctgagtcaaagtaaattcagatgccaggtatgtggatatacagcgaacgccgatgtaaatggcgctcgcaacattttagcggcggggcacgccgttcttgcctgtggagagatggtgcagagtggccgcccgttgaagcaggaacccaccgaaatgattcaggcgacagcctgaacgtagcagggatccacgtccttcagggcgtggaggatgtcaatatcggtttctgtcagcgattaaattcaacaccacgtaacaaacgcctccggcaattaatccccaaaacgcagaaccaatcccgaccagcgtcaatccacttgccgttaccagaaatgccaccaccgccgcgtctcgctcacgctcattatgcagcgcctgatacaaactgccgccgatggtacttaacagcgccagacctgccagcatctggatccaacttacgggcagggcagccatcatcccggtaatggcactaccaaacagacctgcgagcaaatagaaaatgcctgcaacggcagcggccagccaacgttgatctttatccggatgcgcttccgggctttggcaaatagccgcggtgattgccgcaataccgacggaataaacgccgaaaggggaaaaaaccagtgccagcaatccagtaaatacaattaatgggctaacaggagcgctatatccagctgctttcattgctgcgatacccggtgcgttttggcttgccatcgtcaccagaaaaagggggagtgcaacgctcaggctgtgagcaaagctaaaatcaggggtaatataagtggggagaacgggtttaaagacaacatcagttgtgacaacgtcaccttgcgcgatgacgatcacgatcccaataatcatcgcggcaattaccgcatagcgcggcgcaacggccttggttgccagccataccagcaacatacttccacacaacgtaaattgaccgtccagactggcaaacgcctgtaaaccaaagcgtaataaaatcccggcaagcattgccgccgcaaggctgtgcggaataatgcgcatcagacgagcaaagagtcccgttatgccgcagaggactattagcgcgttggtgacaataaaaacgccgatggcttcgttaagtgttagtccctgcaatccggtgaccaacaaagccgcgccaggcgtactccatgcggtgagaacaggtacgcgataccataatgtcagagtcagcgtactgacgcccattgccagccccagcgccgtcatccagccagagatttgtgcagtggtggctccggcgacaatcgctgcttgccagattattgccgcactactggcgtagccaattaataccgccagaaaccccgccagtagcgtgggtggaggaatagaaaacagacgcatagtcacctcgtgcgttatagcgtacaggcaccgtagcatttgtccgttataacgcacaagtgataaacttccgttttgccggaggagtcgcatggaaaatctcgctcgctttttatccaccacacttaaacaactacgccagcagcgcggctggagtcttagccgactggcagaagcgacgggcgtttctaaagcaatgttagggcagattgagcgtaatgagtccagtccgacggtcgcgacattatggaaaattgccaccgggttgaacgtaccatttagtacatttatttctccgccgcagtccgctacgcctagtgtttatgatccacaacagtaggcgatggtgatcactagcctgtttccttatgatccacaactctgctttgaacacttcagcattcagatggcatctggtgcaataagcgaaagcacgccccatgagaagggggtaatcgaacatgtcgtcgtcattgatggacaacttgatctgtgcgttgatggggaatggcagacccttaattgtggggaaggcgttcgatttgctgcagacgtcacgcatatctatcgtaatggtggggagcaaaccgtacattttcattccctcatccattacccgcgcagttaagcgggaaaactatttcgcaacgtcgcgcttgtggctaaaatagccgccatttttcagctactggataagaatgtgaccgtatcttctcatcgacttgaactgttaagcccggcacgcgatgccgccattgcccgcgaagctattttgcacggtgccgatgctgtttatatcggcggccctggttttggtgcccgtcataatgccagtaatagcttgaaagatattgccgagctggtgccgtttgcccatcgttatggtgcaaaaattttcgtcacgcttaacaccattttgcatgatgatgagctggaacccgcgcaacggctgattactgacctctaccagaccggtgtcgatgcgctgattgttcaggatatggggattctggaacttgatattccgccgattgaactgcacgccagtacgcagtgcgacattcgtacagttgaaaaagcgaagttcctctctgatgttggcttcacgcagattgtgctggcgcgagagctgaatcttgatcagatccgcgcgattcaccaggctacggacgcgaccattgaattctttattcatggggcactgtgcgtggcctatagcggtcagtgctacatttctcatgcgcaaacagggcgtagcgccaaccgtggcgattgcagccaggcgtgccgtttgccatacacattgaaagacgatcaggggcgggtggtttcctatgaaaaacatctgctgagcatgaaagataacgatcagactgccaacctcggcgcgctgattgatgctggtgtacgctccttcaagattgaagggcgttacaaagatatgagctacgtgaagaatatcaccgcccattatcgccagatgcttgatgccattattgaagaacgtggcgatctggcgcgcgctagtagtggtcgtactgaacatttctttgttccaagcacggaaaagactttccaccgtggtagcacagattattttgtgaatgcccgtaaaggcgatattggcgcgttcgatagcccgaaatttatcggcctgccggtaggcgaagtagtgaaagtggcgaaagatcatctcgatgttgccgttaccgagccactggcaaatggcgatggcctgaacgtgttgattaaacgtgaagtcgtcggttttcgtgccaatacggtcgagaaaaccggagaaaatcagtaccgcgtctggcccaatgaaatgccagcagatttgcacaaaattcgtccacatcacccactaaaccgtaatcttgatcataactggcagcaggcactgacaaaaacctccagcgaacgtcgggtggcggtagacattgaactgggcggctggcaggaacaactgattctgaccctcaccagtgaagagggtgtcagcatcacgcatacgctggacgggcagttcgacgaagccaataacgccgaaaaagcaatgaacaatctgaaggatggtctggcaaaactggggcaaaccctctattacgcccgcgatgtgcaaattaatttgccgggggcgctgtttgtaccaaacagtctgttaaaccagttccgccgtgaagctgctgacatgctggatgctgcgcgtcttgccagttaccagcgcggcagccgtaaaccggttgctgatcctgcgccggtttatccgcaaacgcatctgagtttcctcgcgaacgtatacaaccagaaagcgcgtgaattttatcatcgctatggtgtgcagctgattgacgcggcgtatgaagcacatgaagagaagggcgaagtcccggtgatgatcaccaagcattgtctgcgctttgcctttaatctgtgcccgaaacaggcgaaaggcaatatcaaaagctggaaggcgacgccaatgcaactggttaacggcgatgaagtattaacgctaaagtttgattgccgcccatgcgagatgcacgtcattggcaaaatcaaaaatcacatactgaaaatgccgttaccgggaagcgtagtggcatccgtaagtccggatgagctgctgaaaacattgccgaagcgaaaagggtaaaacgccagttttctggttactcacaacttattgaatctgcatgatattgcctgccgggtaaggcgttacgccgcatccggcatcaaatgactcaacgttgtcccgcttctggtttgcggcttttttgccagtaaaaatgctcgcgcaaaccttccgcgctctcttccgccacagcacgcaattcatcgctgtccgcttcatgacgcagctgatgatccacattctttacccacacaaattcatgtcctttgtgccctgccatgagttgtccactaaacagagcacacgttaataagacaacgcttaacgccttcgtaaacatcctgccacctttttcttaccttttgccgctatgatgccgatcgtttcttgaggttattattcagttttgcaaattagcgcaaagaaattctggaatcttccttcctgattttgcattgcattctgccgttgcggcgatttagtgctattttcgagcaaattacacacggaggtaaacactaatgtttactttgttgatatactcagcggcagggaggcgatgtgaaacaaagcgagttcagacgttggctcgaatctcagggcgtcgatgtagcgaatggcagcaaccatttgaaactcaggtttcatgggaggcgcagtgtcatgccgcgtcacccctgcgatgagattaaagaaccattgcgtaaagcaatcctgaaacaactcggtttgagttaatcgccaattaaaaaggttaatgacatgcgagagacagtcgaaattatgcgttatcccgtcactcttacacccgcgccggaaggcggttatatggtttcttttgtggatatccctgaagcgttgacccagggcgaaactgtcgctgaagcgatggaagcggcaaaagatgctttactgaccgcatttgatttttattttgaagataacgagcttatccctttacctagcccattaaatagtcacgatcactttattgaagtacctttgagcgtcgcctctaaggtattgctgttaaatgcttttttacagagtgaaatcactcagcaagagttagccaggcgaattggcaaacctaaacaggagattactcgcctatttaacttgcatcatgcgacaaaaatcgacgccgtccagctcgcggcaaaggcgcttggcaaagagttaagcctggtgatggtttaattacagttaacgaaaagttgtcatttttaacaactgatatagactgccgaatcatctgcacataattacgattcgataatgaaaaaataccagcagcttgcagaacaattacgcgagcagattgcgagcggtatctggcaacccggcgatcgtttgcctagcttgcgtgaccaggtggcgcttagtggcatgagctttatgactgtcagccatgcctatcagttgctcgaaagtcagggatatattatcgcacgaccgcagagcggttattacgttgcgccacaggcaataaaaatgccgaaagcgccagtcattccagtcactcgagatgaagcagtcgatatcaacacttatatttttgatatgttgcaggccagtcgcgatccgagcgtcgttccgtttgccagcgcctttcccgacccgcgacttttccccctccaacaactaaaccgcagcctggcgcaggtaagcaaaaccgccacagcgatgagcgtgattgaaaacttaccgccaggaaacgcagaactgcgtcaggctattgctcgtcgctatgccttacagggcatcaccatttctcctgatgaaattgtcattactgccggggcgttagaggcattaaacctcagtttgcaagcggtaactgaaccgggcgattgggtgatagtagagaatccttgtttctacggtgcgttgcaggcgctggagcggctacggctgaaggcgttaagcgtggcgacggatgttaaagaagggatagatcttcaggcgctggaactggcgttgcaggagtatccggtgaaagcgtgctggctgatgactaatagccagaatccactcggatttaccttaacgccgcaaaaaaaaagcacaactggtggcgttgctcaatcagtacaacgtaacgctgattgaagatgacgtttacagcgaactttattttggacgggaaaaaccgctgcctgcgaaagcgtgggatcgccacgatggcgttttgcattgctctagctttagcaaatgtctggtgcctggttttcgtattggttgggtcgccgccggaaaacatgcacgtaaaattcaacgcttgcagttgatgagtacgctttccaccagcagtccgatgcaacttgcgctggtggattacctttccacgcgccgatacgacgcccatcttcgtcgcctgcgtcgccagcttgcggaacgtaaacaacgtgcctggcaggcactgctgcgttatctgcctgcggaagtgaaaattcatcataatgacagtggttactttctctggttggagctccccgagccgttagatgccggcgaattaagcctggcggcactgacgcatcatatcagtattgcgccgggtaaaatgttttctaccggtgaaaactggagtcgttttttccgttttaataccgcgtggcagtggggagagcgtgaagaacaggcggtaaaacaattaggcaaacttattcaagaacggctgtaatagcgtttaatttaattcctcttagattgggtaatatgaatttcgaatagcagtcatatttcctaactccttgactatactccagaagataaccttacagacggcataatgcgcggtagctcacaacctgaataaattttctcaggggcgaaggtgtgcctgcaagccgccgtctatggttaaacaaggagatatttttacggcacggcggctgaacaattaattacgacaggagtaagaccttatgagcaagacatttgcccgcagcagcctgtgtgcgctcagcatgacaataatgaccgctcacgccgccgaaccgcctaccaatttagataaaccggaagggcgactggatattatcgcctggccgggatacatcgaacgcggacaaactgataaacaatacgactgggtaacgcagttcgaaaaagagacaggctgcgcggtgaatgtgaaaaccgccgcgacttccgatgaaatggtcagtctgatgaccaaagggggttacgatctggttacggcatccggcgatgccagcctgcgtttgattatgggtaaacgcgtgcagccgattaataccgcattgattcccaactggaaaacgctcgatccgcgcgtggttaaaggcgactggtttaatgttggcggcaaagtttacggcacaccttaccaatgggggccgaacctgctgatgtacaacactaaaaccttcccgacgccgccggatagctggcaagtggtttttgttgagcaaaatctgccggacggcaagagcaataaaggccgcgttcaggcttatgatggccctatctatattgcggacgctgcgttgttcgttaaagccactcagccgcagttgggcatcagcgatccgtatcaactcaccgaagaacagtaccaggcggtgctgaaagtgctgcgcgctcaacacagtttgatccatcgctactggcatgacactaccgtgcaaatgagcgatttcaaaaacgagggtgtggttgcttccagtgcctggccctatcaggccaacgccctgaaagccgaaggccagcctgttgctaccgttttcccgaaggagggtgttaccggttgggctgataccaccatgctgcatagcgaagcgaaacatccggtttgcgcctacaaatggatgaactggagtttaacgccaaaagtgcagggcgatgtggcggcctggtttggcagcttaccggtagtgccggaagggtgtaaagccagtccgttattaggcgaaaaaggttgtgaaaccaacggttttaactatttcgacaaaatcgccttctggaaaacgcctatagcagaagggggcaagtttgttccctacagtcgctggacgcaggattacattgccattatgggcggtcgctaacttcgctggggtgctttatgacgtacgcagtggagtttgacaacgtcagccggttgtacggtgacgtgcgcgcagtagatggcgtcagtattgcgataaaagatggtgagttcttctctatgctggggccgtccggctccggcaaaaccacctgcctgcgcctgattgctggcttcgaacagctttccggcggggctatctctatctttggtaaacccgccagcaatctgccaccgtgggagcgggacgtgaatactgtctttcaggactacgcgctatttccgcatatgagcattcttgacaatgtcgcctatgggctgatggtcaaaggcgtgaataaaaagcagcggcacgcaatggcgcaagaggcgctggagaaagtggcgttggggtttgtacatcaacgtaaaccgagtcaactttctggtggtcagcgccagcgggttgctatcgccagagcattggtgaatgaaccgcgcgtattgctgttggatgaaccgctcggcgcactggatctcaaattgcgtgagcagatgcagctggaactgaaaaaactgcaacagtctctcggtatcacttttatcttcgttacccacgatcagggcgaagcgttaagcatgtccgatcgtgtggcggttttcaataatggacgcattgagcaggtcgattccccgcgcgatctctatatgcgcccgcgcacgccgtttgttgccgggttcgttggtacaagcaatgtttttgatggactgatggcagagaaactttgtggcatgacgggaagcttcgccctgcgaccggaacatatccgcctcaacacccctggtgaactgcaggccaatggcacgatccaggcggtgcaatatcagggcgcggcaactcgttttgaactgaaattgaacggcggtgaaaaactgcttgtgagtcaggccaatatgacaggcgaagaactgcctgccacgctcacgcccggacaacaggtgatggtttcctggagccgtgatgtgatggtgccgctggttgaggagaggtgaatggcgatgaatgtattgcaaagtcctagtcgtccaggtctgggtaaggtgtccggtttcttctggcataatccggggctggggctgtttttactgctgcttggcccgctaatgtggtttggcattgtctatttcggcagcctgctgacactgttatggcagggattttatacttttgacgatttcaccatgagcgtaacgccggaactgacgctggcgaatatccgtgcgctgtttaatccggcgaattacgacatcattctccgcacgctgactatggctgtggcagtcactatcgccagcgccattctggcttttccaatggcgtggtatatggcgcgctataccagcgggaaaatgaaagcgtttttttatattgcggtaatgttgccgatgtgggcgagctacattgttaaagcctatgcctggacgttattgctggcaaaagatggcgtggctcagtggtttttacaacatcttgggctggaaccactgctgactgcgttccttacattacctgcggtgggcggaaatacgctgagtacttccgggctggggcgctttctggtgtttctctatatctggttgccgttcatgatcctgcccgttcaggcggcgcttgagcgtttgccgccgagtttgttgcaggcgagcgctgatctcggcgcacgtccacgacaaacctttcgctatgtggtgctgccgctggcaatcccgggtattgccgctggctctatctttaccttcagtctcacactgggcgattttatcgtcccgcagctggttggtcctccaggatattttatcggcaatatggtttattcccagcagggggcgattggcaatatgccgatggcggcggcattcaccctggtgccgattattctcatcgcactgtacctggcgttcgtgaaacgtctgggagcgttcgatgcactctgaacgcgcaccgtttttcctcaaactggcggcctggggcggcgttgttttcctacattttcccatcctgataatcgccgcctatgcgtttaacactgaagatgcggcgtttagttttccaccgcagggcctgacgctgcgctggtttagcgtggcagcacagcgtagtgatattcttgatgccgtgacactgagtcttaaagtggcggcgctggcgacattaattgcgctggtgttagggacgctggcagctgccgcgctgtggcgacgagactttttcggcaaaaacgccattagcctgttactgctgctgcccattgcgctgccgggcattgtcactggtctggcgttattaaccgcctttaaaaccatcaatctggagccgggatttttcaccatcgtggtcggtcatgcgactttttgtgtagttgtggtgtttaacaatgtcatcgcccgttttcgccgcacctcctggagtctggttgaggcgagtatggatcttggggccaatggctggcaaaccttccgctacgtagtgttgccgaatctcagtagcgcgttactggcaggaggaatgctggcgtttgccttgagcttcgatgaaatcatcgttacgacctttacggcaggtcatgaacgaacgttaccgttgtggttgctcaatcagcttgggcgaccgcgtgatgtaccggtaactaacgtggtggcactgctggttatgttggtaacaaccttgccgatcctgggggcctggtggctaacccgcgaaggcgacaatggtcaataaccactgatacaggaatatgctatgcaacataagttactgattaacggagaactggttagcggcgaaggggaaaaacagcctgtctataatccggcaacgggggacgttttactggaaattgccgaggcatccgcagagcaggtcgatgctgctgtgcgcgcggcagatgcagcatttgccgaatgggggcaaaccacgccgaaagtgcgtgcggaatgtctgctgaaactggctgatgttatcgaagaaaatggtcaggtttttgccgaactggagtcccgtaattgtggcaaaccgctgcatagtgcgttcaatgatgaaatcccggcgattgtcgatgtttttcgctttttcgcgggtgcggcgcgctgtctgaatggtctggcggcaggtgaatatcttgaaggtcatactagcatgatccgtcgcgatccgttgggggtcgtggcttctatcgcaccgtggaattatccgctgatgatggccgcgtggaaacttgctccggcgctggcggcagggaactgcgtagtgcttaaaccaagtgaaattaccccgctgaccgcgttgaagttggcagagctggcgaaagatatcttcccggcaggcgtgattaacatactgtttggcagaggcaaaacggtgggtgatccgctgaccggtcatcccaaagtgcggatggtgagcctgacgggctctatcgccaccggcgagcacatcatcagccataccgcgagctccattaagcgtactcatatggaacttggtggcaaagcgccagtgattgtttttgatgatgcggatattgaagcagtggtcgaaggtgtacgtacatttggctattacaatgctggacaggattgtactgcggcttgtcggatctacgcgcaaaaaggcatttacgatacgctggtggaaaaactgggtgctgcggtggcaacgttaaaatctggtgcgccagatgacgagtctacggagcttggacctttaagcagcctggcgcatctcgaacgcgtcggcaaggcagtagaagaggcgaaagcgacagggcacatcaaagtgatcactggcggtgaaaagcgcaagggtaatggctattactatgcgccgacgctgctggctggcgcattacaggacgatgccatcgtgcaaaaagaggtatttggtccagtagtgagtgttacgcccttcgacaacgaagaacaggtggtgaactgggcgaatgacagccagtacggacttgcatctagcgtatggacgaaagatgtgggcagggcgcatcgcgtcagcgcacggctgcaatatggttgtacctgggtcaatacccatttcatgctggtaagtgaaatgccgcacggtgggcagaaactttctggttacggcaaggatatgagtctttatgggctggaggattacaccgtcgtccgccacgtcatggttaaacattaaggataatattgcagatcgtaagagtatgagatgatcttgcgtactgtcagagcactgatttctctgacagtacgtgctgcgtgcaaaatcactacatcaaataaaccagccaaatctcatagagataagagtaaacaaaccaacagcagcaaagaaatttatcagtactacagttctactggaaacattcatttttgccaccttttatcattgcccctatgtgtatagtacgggttaagaaaatccgcaataatactcattctgaagatggataagggcaagttgctgtttgatgattttttctcaaactggtgaaaaaacttgatgcacgtcaaaaaatgacgcatatttgcgcgcgttttattcatctggctggacgcccgtacatgtctctctatcaacacatgcttgttttttatgcggttatggcagcaatcgcatttcttatcacctggtttctttctcacgataagaaacgcatccgtttcttaagcgcctttctggtgggggcaacatggccgatgagtttcccggtggcgctgttgtttagtctgttttaaatcttactcactggcttgacggcaccacgcagacttatatcatttggatgaatcgataaatttcacaagtggctaaggagaaagtatgagccatctggatgaagtcatcgcgcgcgtggatgccgcgattgaagagagcgtcattgcccatatgaacgaattattaatcgccctgagcgatgacgcggagttaagtcgggaagatcgctacacccagcagcaacgtctgcgcacagcgatcgcccatcacggtcgcaagcataaagaagatatggaagcgcgccacgaacagttaaccaaaggcggcaccatcctctgattaaaaactgcgtctggctaccaaccaggcgccaaccacaagtaaaattgcgccacaaattgggccgaacaacgcccgtagtggtacgccatgactgcggaagatatccagcatcagaccgccaatcagctgactggcgaccagtacagcaatagttgtcgccgctcccacattctgatatccgctgatactggcgaagacaaaaaagcttcccagcaagccaggtataagtgtccaccagcgcacgctggacaccagttcgccaaaccccgccatgccttgtttaaaccataaaatagaaacaaagagcacaatccccaccagactgttcagcaacatggcgatgagaatggtagaggaggtctgggtgatgcgcaccatcagcgtgttctggacaaccagaccaattccggcggcaatcaaaaaagcaagggtgaggctctgattcatccaatcgcgtccggttcagtgcgctcgtcgagttgcaactgcataaatgtcagatccagccaacgaccaaatttagtgcctacctgcggcatttgcgcggtgacgacaaatcccaggctctggtggagatgcaggctggcctgattttggctttcgatcccggcgaccatgacatgcttcccgcaatcccgcgcttcatcaatcaatcggcttaacaatttacgccccagacctttgccctgatgatcgggatggacataaacgctatgttccacggtatggcgaaaaccatcgaaactacgccagtcgccaaagctggcatatcccgtcactacgccgttttcctcgctcaccagcactggataacctgctaaagtccgcgcttcaaaccaggcaatgcggttatcagcatccaccgtttggtcattccagatagccgccgtatacaacacggcgtggttataaatttccgcaatggcagcacagtcggctttgcgggcaaaacggatggacatgtctggcctcaataaaataatgatgatgatgttatcaatactatcgaaaacagcccgaagcaacggattcctcgatgaaattattgcgtgttgcagaggggatgtgacggctgcaaacaaaaccaatcccgtgagcctgctactattgatggattcatgccaaaagcacaggagagcattatggggcaacaaaagcagcgtaatcgacgttgggttctggccagccgtccacatggcgcacctgttccggagaatttccgtcttgaagaagatgatgtcgccacaccgggtgaaggacaggtgttactgcgcacagtttatttgtccctggacccgtatatgcgtggacgtatgagcgatgagccatcttatagtccgcctgttgatattggcggcgtgatggtcggcggtacggtgagccgtgtcgtggagagcaatcatcctgattatcagtctggcgactgggtgctgggctacagtggatggcaagactatgacatatccagtggtgatgatctggtgaaacttggcgatcatccgcaaaatccaagctggagcctgggtgtgctagggatgccaggctttaccgcttatatgggcctactggatatcggtcagcctaaagagggcgaaacgttggtggtagctgcggcgacaggaccagtgggggcgacggtggggcaaatcggcaaacttaaaggttgcagagtggtgggggtagccggtggcgcggaaaaatgccgccatgctaccgaggtgttaggcttcgatgtttgtcttgatcaccacgcggatgattttgccgaacaactggcgaaagcgtgcccaaaaggtattgatatctattatgaaaacgtgggcggtaaggtattcgatgcggtgctaccgttacttaatacatctgcgcgcattcccgtctgcggattagtgagcagctataacgctacagagctaccacccggtccggatcgtttacctctgttgatggctacagtgctgaaaaaacgtattcgcttgcaaggttttattatcgctcaggattatggtcaccgcatccatgagtttcagagggagatggggcaatgggtgaaagaggataaaatccactaccgcgaagaaattactgacggtttagagaatgcgccacagacgtttatcggcctgctgaagggtaaaaacttcggcaaagtggtgatccgcgtggcgggtgatgattaaagtttcaacggcggcgtaagccgccataaaaatccaggcaaaaagcttattttcagctttaattaactaaccacatcattgttctgctgctaataacaacaaaggtgagtggtttatgattattcactttaatacaccaggtgaattccttctgccatgcaggcagggttggacagaaaacacgcgaaggaattaaaatgcctggaacgggaaaaatgaaacatgtcagtttgactctgcaggttgagaacgacctgaaacatcagcttagtattggcgcattaaaacctggcgcacgcctgattactaaaaatctggcggagcaattaggtatgagtattacacctgtgcgtgaagcattattacgtctggttagcgtgaatgcgctttctgtcgcacctgcacaagcatttacagttccggaagtggggaaacgtcaattagacgaaatcaatcggatccgctacgaactggaattaatggcagttgctctggctgttgaaaacctcaccccgcaagaccttgcggaactccaggaattgctcgagaaattacagcaggcgcaagaaaagggcgacatggaacaaatcattaatgtaaacaggctatttcgcttagcgatttatcatcgcagtaatatgcccatcctgtgtgagatgattgagcaactgtgggtcaggatggggcctggtttacattatctctatgaagcgattaatccagcggaattacgggagcatatagaaaactatcatctgttactcgctgcgttaaaagcaaaagacaaagagggatgcagacattgtcttgctgaaattatgcaacaaaatattgctattttataccagcaatacaatcgttaaagtaaatgcccggcaaataccgggcatcaaggtaattactcaaatctccacgcaatattcatgccgacaccataatttcgtccggggctaggttcgtaatatcgcccgttactctcattgacaatgacagaaccaacgtattctttatcgaataaattatcgacacgaccaaataaatccacagttaaattgtggtaattgtatttatacccggtgaataagccgacgagagtataagacggcgcttttgccgtattttcatcatctgccataatatcgcccatataacgcgcttccgtgcctgcataccaaccatcttccggtacataacctatgctcgcaaagcccatattacgggcgatccctggcatccgattaccgttacaatcctgttcattgcaaacattgctgcgataggtcgcatcaagccaggtccaggacgcgtttacgcgaaaatctcctgcgaaacgttgatcccatgccagttcagcgccttgacgacgggtctttccggcatttttgtaagtcgtacgcccaccgctactgctatcgacaacaatttcatcatcagtgtcggtctgaaacaatgcgagactaagcagcccatcaccaatacgcgttttactgccgatctcaattgtatcgttggtggatggttttaaacctaagttcataccgctttgcccatcagcacgataagacagctcattaatcgtcggcgtttcaaaacctcgcccggctgccagatagatattccaggcatcggtcattgcatattttaagctaccggcaggtagccatttatgataactggcatcaccgctgtcatcgccgttacccggagtaacgtaatggtcgttggaatcaaaccacacggagctgtagcgcacgccagcatccaggctcagtttttcgctcagctgccactgcgtctgtaaatagggatcgatgttccacatcagattgcgttcgtcgcgacgcaactcacctttttgcccgtactccggcatgccgctattcaggcggaagttattgtagcccttgcggttttcactcatgttttcgtagttcaggccggtagtgaacgtgaccggaacgcccagttcaccacggtgtgtccagcggctgtctattccctggtaatggcgttgcagggtaatcacgccgcccgcatgactcgggttaagttgtggtgccatgggtatactctggtactgggtcgtttctcgctctccggcatacatcatcacactcatatcatcccggctactcaggctacgctcatagcgcaacccagcctgagtttgcttgatggtttttcgcgtgtcgtactgttctgcacgaggcgcttgttgtggattagccttccattctgctttggttagcccacctgggtcatctgctttgatatccacactattgaaaatcagacttaatttgctggcttcatcaatgcgtacgcccagtttggcattggctaaatttttctgtgcgccactatggtcacgatagccgtgggtcgtaaaacgcgtggtactgacggtgtaatcgacatcgccaggctgtgtgccgtctcccgttgcgcccgttgctttcagcccatagcgccagctgccaaaactgccgtagtaactactggcttcaatggttggtggctgttgtccggtctgggtggtgacattcattaccccaccagacgcgttgccatacagggcagagaaggggccacgcagcacttccacattttgcacactgcttaaatcgatgttggatgtttgcccttgcccgtcgggcatggtggcgggaataccgtccacatacaggcgaataccgcgaataccgtaagtggagcgggagccaaatccgcgaatgctcagctgtaaatcttgcgcatagttctgccggttttgtacctgcaaaccaggcacgccggtcagactttcggacaagttaatgcgcggtgttgccaggcgcatctcctcgccatccaccacgcttactgctgctggggtatccagttcactaaccacctgcggtgcggcactgacaatcatagtctgttcatcagcggcaaaaacaacgggggaaaggacaagcagtgcgggcaaaacggtctgtcggacggaaaaaatcttcatgaaaaaagccaggttaagaatgggaaaacgccgtcatggtaatgaaattgtaaatttatggaaaatgaaacggcacaatacgttaagtaattgagaaaattgtagtcgtaacggcaagaaatgctccacatttgagaaaataatgattaccattcccatttataacaagagcgtaacgatgattacgcttagcgaagcattgtgaagcagcaaaaatatcggttcatcaaagggagtcgtcatgcatttacgtcatctgtttagtagccgcctgcgtggtagtttactgttaggtagtttgcttgttgttagtagtttcagtacgcaggccgcagaagaaatgctgcgtaaagcggtaggtaaaggtgcctacgaaatggcttatagccagcaagaaaacgcgctgtggctcgccactagccaaagccgcaaactggataaaggtggcgtggtttatcgtcttgatccggtcactctggaagtgacgcaggcgatccataacgatctcaagccgtttggtgccaccatcaataacacgactcagacgttgtggtttggtaacaccgtaaacagcgcggtcacggcgatagatgccaaaacgggcgaagtgaaaggccgtctggtgctggatgatcgtaagcgcacggaagaggtgcgcccgctgcaaccgcgtgagctggtagctgacgatgccacgaacaccgtttacatcagtggtattggtaaagagagcgtgatttgggtcgttgatggcgggaatatcaaactgaaaaccgccatccagaacaccggtaaaatgagtaccggtctggcgctggatagcgaaggcaaacgtctttacaccactaacgctgacggcgaattgattaccatcgacaccgccgacaataaaatcctcagccgtaaaaagctgctggatgacggcaaagagcacttctttatcaacattagccttgataccgccaggcagcgtgcatttatcaccgattctaaagccgcagaagtgttagtggtcgatacccgtaatggcaatattctggcgaaggttgcggcaccggaaagtctggctgtgctgtttaaccccgcgcgtaatgaagcctacgtaacgcatcgtcaggcaggtaaagtcagtgtgattgacgcgaaaagctataaagtggtgaaaacgttcgatacgccgactcatccaaacagcctggcgctgtctgccgatggcaaaacgctgtatgtcagtgtgaaacaaaaatccactaaacagcaggaagctacccagccagacgatgtgattcgtattgcgctgtaatagatatggcgagggtgaaaacggtgagacttgcctgccttttatcacggcgtatccggcactttcgtcagtaatctgaatttgcccggcacgtagccgggcaattttgcaattaactcgccgtttcaggcttaaacacaatttcctgtttttcttcatcttcctcgacgactggcgcagtgctgtgaatttcagcaacgcgtttgcgcacaccaaaccagcctataaccagcaaaataccgataatcggcagcgccgcgatagtataagtcccgttcgggtaatcgaacgccatcagcacaaggacactcagtaaaaacagtaatgtcagccaggaagtgaagggcgcgccaggcagtttaaaactgacatccgctgctttgccttctttaatcgctttacgcaggcgcatctggcacacgatgataaacgcccaactagcgatgattcccaggctcgcgaagttcaacacaatctcaaatacgcggctcggcaccagatagttgaggaatacgccgacgacatacacaactagtgtcgccagaatcccggcatacggcacatgctgacgactcattttcgccataaaactcggtgcggaaccgcccatcgccatactgcgcagaatacgtccggtgcagtacagaccactattcaggctggagagggcagcggtcagcaccacaatgttcataatgctgccgatatatggcacacccagtttagagaaaaacgtcacgaacggactttgccccgcctgatacgcgctccacggcaataacataaccagcaacaccacggagccgacgtaaaacaggccaatacgccaaatcacactgttaatggctttaggcaccatggtctgcggatctttacattctccggcagctgtacccaccatttcaatggaggcaaaagcaaacactacgccctgaatcaacaccagcgcaggcagcaaaccgtgggggaagaagccgccattatcggtgattaaatgaaagccagtggtgttgccatccagcggctgaccactaccgaggaacactgtacccacgaccaaaaaggtcacaatggcgagcactttaataagcgcaaaccagaactccatctccgcaaaccatttcacaccgatcatattcatggtgccaacgatggtaagtgcagcgagcgcaaagacccactgcggcacgccgccaaacgcaccccagtaatgcatatacagagcgacggcggtaatatcaacaatccccgtcatcgcccagttgatgaagtacatccagccagcaacataagcggctttctcacccaaaaactcacgggcataagaaacaaaactgccactggaagggcggtgtagcaccagctcacccaatgcacgcagaataaaaaagctaaacaagccacaaattaaataaaccagtgccagtgcgggccccgccatttgcagtcgggctcctgcacctaaaaacaagccggtgccaatcgcgccgccaatggcgatcatctgcacctggcgattgcccatcgctttgtgatacccctcttcgtgggcattaagccagcggcgtttcgcggcgtgttgatcactagtgtcggtgtcgtgtttactcattgctctccctgattgctttaatgaaaaagtcatataagttgccatgaacaatgtttattcatcctggcgatgatagttatcaccattattctttatgggtataaaactatcggcgcagcatcctacccgttatcgataaacgatgcaaaacatccccttacaatcctgaaggggattaatacaactgacgaaaaaatgacaaatccttttgctggttaacctgtgtactgtcctacacttaatctttaaaagattgtgaggggcatatgattaaggtgtatggcgtacccggatggggctctacaatcagtgagctgatgctaacactggctgatattccttatcagttcgttgatgtcagtggttttgaccacgagggagctagtcgcgagttattgaaaaccctgaacccgttgtgtcaggttccgacactggcattggaaaatgacgagattatgacggagacagcggcgattgcattgatggttctcgatcgtcgcccggaccttgcgccaccggttgggcgcgccgaacgtcagctgtttcaacggctattggtctggctggttgctaatgtctatccaacattcactttcgccgattaccctgagcgttgggctcctgacgcacctgaacagttaaagaagaatgttattgaatatcgaaaaagcctttatatctggttgaatagccagctcactgctgaaccttatgcgtttggtgagcaactaacgctggtggactgttatctttgcactatgcgcacatgggggcctgggcatgaatggtttcaggataatgccacgaatatcagtgcgattgctgatgctgtatgtcagttaccgaaattacaagaagtattaaaaaggaatgaaattatttgagtgggataccagaagattatgttatttattattcagtaactttatccacaatgatgggcgtaattaattaaattcatggtatgttttttaatttatatcactctccttttcattcagcgtgtctatttcatttcctctgaaaagaaactaactattcacatcgtgcagatgtttcagttgttaagtcaggcattctataatctcaaaatgtttttaatgatggatatgctcggagttggagatgcaattaatattaatacaaataaaaatatccggcaggtatgctaaaaggataaatggcgttctctgtatttattcgcaattatctgtaggacaaatatggagagcttgatgagtcagagctaaaacagcaattgattaataaacatgttgatttattcaagaaaatggatgtattttaaatgttgattcttaatataacctaatcaatagattatcaagtgagagctacacattattggaggggcaggggaaaacaccattttgggaacaatgcatcaggtactcttaccactgaagcaagatcatccggcaccaggtggtggtgcagtgctttggaaatggtcccctcgggggagttgtcattattttctatgctatttgcttattatattcatcaggtgaatttaataaattcctaatttgaaatatccactattaagctagtgtttaacgacgttaagatggcaatgtgcagatcatgttatcagggtggggcggtagcgtatattccttatacaaaccatcattcatttcaatgattgttattgaattatttattgttgtgaataaaaagacattatgaatattggtttgactttgcatatcaggttttttattactcgctgtaatgtacgagcctgtcgtgaataacgtcgagaacccatccgttgcgtttgtgattattttgttgactaaacagacacccgtttctctgaagtaaaatcccagactaaatcatcacataaccatgacatttttctgatattccccggtaacgccagataacgatgccaaatttaccgttatgttcaatcaactccctggtccatgtcgatttatctaccacaatcgccacgcgtggaggttcaaactccaccggcattgaccaggctgcagccataatgttacgccgctgggattgctcatcgaaactggtgatcaagaccgttgggccatgatttaacagacggctggcatggtgtaattctatggggatgaatcggctcatggtatcgcctcgcgaagaaggtttttttaagcgtagtccgtaacgcaataagtaacgaaattaacgggattggcgatttgcgaacgtgatgcatgtccgcgatcgcacaaaatagccggtgcggcgtctattccaggttataagttgagaaaaccactaagggaaacgcctgatgacgcccattctgaatcactattttgcccgtattaactggagcggagctgctgcggtcaatattgatacgcttcgtgcattgcacctgaaacacaattgcaccattccgtttgaaaacctcgacgttttgctgccgagggaaatacagcttgataatcaaagcccggaagagaaactggtgatagcccgtcgtggcggttactgttttgagcagaatggcgtgtttgagcgggtgttacgcgagctggggtttaacgttcgcagcttgttagggcgcgtagtgttaagtaatccgccagcattaccgccgcgcacccatcgtttgctgttggtggaactggaagaggaaaaatggattgctgatgtcggtttcggtgggcagacgctaaccgcgccgattcgtttagtttccgatctcgtgcagaccacgccacacggagagtatcggttgttgcaggagggtgatgattgggtgttgcagtttaatcatcatcagcattggcagagcatgtaccgttttgatctctgcgagcagcaacaaagcgattatgtgatgggcaatttctggagcgcgcactggccgcagagccattttcgccatcatttgctgatgtgccgccatttgccggacggcggcaagctgacactgaccaattttcattttacccattatgaaaatgggcacgcggtggagcagcgaaatctaccggatgtggcgagtttatatgctgtgatgcaagaacagtttggtctgggcgtggatgatgcgaaacatggctttaccgtggatgagttagcgctggtgatggcggcgtttgatacgcacccggaggcgggaaaataatttatgtcaggttgccggatgcggcgtaaacgccttatccggcatacattagcccggttgtagacctgacaggcgaagcgcatcagacaacggtttcagagttcaattgcccattcggcatgaaacaaaatcaccgctgtgccactaatggtgactttttccggttggttatcacgaattgtcaccgtcacttcaatcataccgtcacgccccaatgcgcgcccctgatggcctttaacacgcaacacgttgccatcgtggggcaatacgttgtgatgtaccaaccatgcacccatcgggccattggcattgccagtcaccggatcttccacaataccaatcgcagggctgaacatgcgaccatcggtttcgtttttgcctgggcggatctggaacgggaagaaaccattgcagccaatctttttgctgatagcggtcagcgcattaaggtcagggctaagggcgtcgatatccacttccggtttcagtgggatcatcactttactgtgtcctgttgttgccacctgaattggcaagcctggcagaatatcgtcctcagtgagatgaagcgcgttgataatcgccgcacgtgtttcaccttccagcggtggctcaaagcccggcgtaccttgttccaggctaatacgataatcatcgttgtgcttttcgatagtcacgcgatgttttcctgccaggcttgtttgccagatcgtgcaatttcctaaacctaacaccttcgcacgtacatagtgcgcagctactgtcgcgtgaccgcaaatcggcacttcaaccgttggcgtaaagtagcggatgcgcacatcgctgtcgtcgctgtgcagcagaaaagcagtttcgctatggcctaactcgcgggcgataagctgcatttgcgcttcgctaagattatcggcggggaaaacaacaccggcagaattgccgcgaaacggttgactggtaaaagcatcgacgtggtacacctgcggtttcattaacgttctcctgtgactggagaactatcatagcctgcaagtggccggagagcgaagggctatccggccagggtgaaattatcgccggctacgcacaatttgatatcgacgagtaaagtactcaaacggcgcgctccacacatgcaccagtcgggtgaacgggaagagcaggaagatggtcattcccaacaccagatgcaggcggaagacgaacgctacgccgttgagcatctcactgcttccaccacggaaagtgacaatgctttgcgcccaacccaccagcttcatcatttcgctaccatcaggatactgtgcactaaacggtatggtacttagccccaacagacactggatcagcaaaatgctcatgatgatgatatccggcgtagtggaagtggcacgcacgcgctgatttgtcagcctgcgccacagcagtcctgcgccgccaatcaacgtcaacacaccgcaaataccgccgagcaccatcgccatgagttgtttcgctgccactggcaaaaaccacgcgtacatccagtgcggcgttaacatgccgaacaagtgcccgaagaaaatccccaaaatgccgatatggaacagattgctccatatcaccatcccgcgtttatcgagcatttgactactggaggcgcgccaggtgtactgcccgtagtcgtagcgcagccagctgccgaggaaaaacaccgtcgcacaaatgtacgggtagatatcgtaaaaaaagacgttcagatactgaatcatttcccacctcccgcactgatgtcgacatattgcggcgcgacatcctggctaaagcgtcgctgatattgattaagcgggctgctgtcacacgccgtggcgttatcttcaataaacttcacctgttcctcttcccacactgcatcaagcgcctggcgggtgtcatcgcgctcttcgctgtttacttgttttgtgacactgtcactactaagggagcttcccgccagttgcagcagagcatcaaacaacgcgtaccacggtgcctcgcgttgttttaagcgaccgccaagcagggcgaggatcggcgcaacattgagcaatccttctttcgcctgatcgtcaggcagtacgcttaaatactccagatacagcggtagataatcgggcagttcccgacaatccagctgcaggccgaccttttcatactccgccagcaggtccaccattgcctggccgcgatcgcgggactcggcatgaacatgttcgaacagcagcaggctcgtggtgcgcccgcggtcaaacacttcgcaccattcggcctgtttatccagcagcggcgcgttaagcaggttgtgggtgaaatccgtaagcatcggcgcgtcgcggcggatcaacgccagcgcgtcctccttgcattcccacaacagctcgtccggatactccatcaacaggccgatcactttgaggatctgcattattcgccctccgctttgtcgcgcacttcggtgatgttgatggcatcgatacggctactgttgaacaggttgaatttactgtcgctaccgtggcaaccgtcgccaaaggtaaaaccgcagccgttgcgttctgcgaaggcatcgcccgccatttcccgatggctggtcgggataacaaaacgatcttcatagttggcaatggcgagatagcgatacatctcttcgacctgggcgacgctcaggcctacttcgtcgatggcacgagtatcagtaacgccttccacggtttgactacgcatatagtggcgcatcgccatcatccgtttcagcgcccgcagtaccggaccggtatcgccggcactcaacatattggcgagatattgcaccggaatacgcaggctttcgatggcgggcagcacgccttcgcttttcggcaaaccgcccgcatctgcgtaggactgaatcggactcagcggaggaacgtaccagaccatcggcagggtgcggtattcagggtgcaacggtagtgccagtttccagtccatcgccattttgtagactgggctacgctgggcagcgtcaatcacattttgtggaataccttgtttcagggcttcctcgatcacactgggatcgtgtggatcgaggaacacttcgcactggcgttcatagaggtcaacttcgcgctcggtgctcgccgcttcctcgatgcggtcggcgtcgtaaagcagcacgcccagataccggatgcgacccacgcaggtttcactgcacacggtcggttgaccggactcaattcgtgggtaacagaagatgcatttttcactcttgccgcttttccagttgaagtagatttttttgtacggacaaccgcttatgcacaaacgccagccacggcatttatcctgatcaatcagcacaatgccgtcttcttcgcgtttgtagatagcgccgcttgggcaggtcgccacgcagctgggattgaggcagtgttcgcacaggcgcggcaggtacatcatgaaggtgttttcaaactgcccgtacatctccttttgcatggcctcgaagttgcggtcgcgggcacgtttttcgaactcaccgcccagcagttcttcccagtttggcccccagatcactttgtccatccgtttgccgtcaatcagactacgcgggcgagcagtaggaatatgtttgccttccggtgcgctatgcaaatgttcgtagtcgaaggtgaaaggttcgtagtaatcatcaatctgcggcaccaccgggttggcgaagattttggttattacgcccatcttgttgcccagacgcgggcgtatcttgccattcacatcacgcacccagccgccttgccactcttcctgatcttcccagtttttcggataaccaatgcccggtttggtttcgacgttgttaaaccatgcgtactccatgccttcgcgcccggtccagacgtttttacaggtcacgctacaggtatggcagccgatacatttgtcgaggttaagcaccatgccgacttgactacggattttcattttttcgcctcctgtacctgatcgcgaccttcatcatccagccagttaacgttcttcatcttgcggatcatgatgaactcatcgcggttgcttccgacggtgccgtagtagttaaagccccaggccagctgcgcgtaaccgccaatcatatgcgttggtttcgggcaaacgcgggtaacgctgttatgaatgccgccgcgcatgccagttacttcgctaccaggaatattcataatgcgttcctgggcgtgatacatcatggtcatgcccggcggtacacgttggctgaccaccgcgcgggcagtcagcgcgccgttggcgttgaatacttccacccagtcgttatcgacaatggtcagttctcgggcatctgtttcgctgatccagacaatcggtccaccgcgagagagcgtcagcattagcaggttttcactgtaggtactgtgaatgccccatttctggtgcggcgtcaggaagttaagtgctttttccgggaagccgtttggcggtatctggcgcatctcactgacgctacgggtgtcgataggcgggcgataagccaccaggctttcaccaaaagcacgcatccacggatgatcctgatagagctgctggcgtccgctcagcgtgcgccacggaattaactcatgaacgttggtgtatcccgcgttataggagacgtgatcgctttccagaccggaccaggtggggctggagataattttacgcggctgcgcctgagtatcgcgaaagcgaatcttctcgtcctctttgtgcagcgccagatgggtatgttcgcgcccggtgatctcgcccagcgcctgccacgctttgactgcaacatgaccgttggtttccggtgccagtgccagaatcacttcactagcgtcaatggcggtgtcaatcagcggacgcccctgtgccgggccatcacgcttggtgtaattgagtttgccgaggaaatcgatttcatcctgggtattccagctaatccctttaccgccattgccaagtttgtccatcaatggcccgaggctggtaaagcgttcatacgtagcagggtagtcgcgctccaccgccacaatattcggcgcggttttgcctggaatcagatcgcattcgcctttgcgccagtcgagcacttcacacggctgactgagctctgccggagagtcatgcagtaggggttgtaataccacgtcggtttctttgccaagatgacccacgcacacttggctaaatgctttggcgatacctttgtagatttcccagtcgctgcgactttcccacgccggatcgaccgccgcagaaagcggatgaataaacggatgcatatcgctggtgttcatatcgtctttttcgtaccaggtggcggtgggcagaacgatatcggagaacaggcaggtactggacatgcggaagtcgagcgtcaccagcaggtcgagcttgccttcaatcgctgcagtttgccactcgacttcttccggtttgatcccgtcgctggcaccgagttcctcgccctgaatcccgctttcggtccccagcagatacttctgcatatactcgtggcctttgccggaggagccaagcaggttagagcgccagacaaacaaattacgcggatgattgctgctgctatctggttgttcgcaggccatacgtaaatcgccgcttttcagcgcctgggcggtaaattctgtgggggataatccggccttgtcggcttcagctttaatcccgagcgggttacgccccagctgcggcgcagaaggtagccagcccatacgttcggcgcgaacgttgaaatcaatcagatgaccgctgtacttactggcatcggcgagcggactaagtaactcctgagcagagactttttcatagcgccattggctggaatgattgtagaaaaagctggtgctgttcatttggcgcggtggtcggttccagtcgagcgcaaaggccagtggcaaccagccggtttgtgggcgcagtttttcctggccgacatagtgtgcccagccgccaccgctttgcccgacacaaccgcagaagatcagcatattgatcatcccgcggtagttcatgtccatgtgataccagtggttaacacctgcgccgaggataatcatgctgcgcccatgcgttttatgggcggtatcggcaaattcacgggcgatggtttcaatatactggcgcggcacgccggtaatttgctcaccccaggctggggtgtacggtttgatttcagcgtaatctttcgcactgttttcatcttccagcccgcgatcgaggccgtaattcgccagtaccaaatcataaacgctgaccaccggacaggtgttgccatcgactaacgtcaggtttttaacgggcaattggcgcaccagcaccggattgtgttttacgctgcgaaaatgcggattttcaatgccgccaaagtaggggaaggccacgcctgcaacagcgtcatgttgaccgagcagggttaagctcaattcggtttccgtaccggcggcaatggattccagattccatttgcctttttctccccagcggaaaccaatgctaccgttcggcactaccaattcacctgcggtattaactgctacggttttccactgcggattgttgctttcgcccagtccatccaccaggtcagatgcgcggatcatgcgcccgggaacgtagctaccatcgtcgcgaggctccagcattaccagcatcggcatgtcgctgtagcggcggcagtagttgataaagtagtcgctgggattatcgagatgaaactcttttaaaatcacatggcccattgccatcgccagggcgctatcagtgccttgtttcggtgccagccactggtcgcacaatttggccacttcagagtagtcaggggtaatggcgatggttttagtgcctttgtagcgtacttcggtaaagaagtgggcgtccggcgtacgtgtctgcggtacgttagacccccaggcgatgatgtagctggagttataccagtcggcagattccggtacgtcggtttgctcgccccaggtcatcgggctggcgggcggcaggtcgcaataccagtcgtagaaacttaaacaggtgccgccaagcaggctcagataacgcgttccggcggcgtaagaaaccatgctcatcgccgggatcgggctgaaaccggcaacgcgatccgggccgtaggttttgatggtccagacgttagcggcggcaatcagctggtttagttcctgccagttggagcggataaacccgccgcgcccacgcacttgtttgtagctcaggcacttttgcggatcgttcataatgcttgcccacgccagtaccggatcgctgtgttgcttgagggcttcgcgccacagttcaatcagtcgtttacgaatgagcgggtatttcaggcggttagcgctgtaaagataccaggagtaacttgcgccacgcgggcagccgcgaggttcatgattgggcaggtcagggcgagtgcgcgggtagtcggtctgttggatttcccaggtcaccagaccatttttaacgtagattttccagctacaggagcctgtacagttaacaccgtgggtggaacgcacgattttgtcgaactgccaacgctggcgatagctgtcctcccagtcgcggttgctatgcatcacctgtccgtgaccatcggcaaaggtttcgcccttttgtttgaagtagcgaaagcgatccaaaagtttactcatgacatgactcctgctccaggaatgaattgggatctgatgccttgtcggatgcgacacggttgtacatcaggcatcgatctcttatttttggctgaacttccgccgaccataaaccagccaggtcagcagcacacaaacgatgtagaagattaaaaacactttcatcgcgccgaccggagagccggtcatattgaggctcatgccaaacgcctgcggaataaaaaagccgcccactgcgccaatggcactgataaagcccagagccgccgccgtttcggtgacggcttcttcatgagcttgctcatcactaccgcctttcatctttacccgataaatggttatctggcgaaagatgacggcgatcatctggaaagtagaaccacttcccagacccgcagtcagaaacagccccataaatacggcgtaaaaggcgatgaaattaccggagcctgtgcccggtaaggtaaggaacagcagggcactgaaaatcgccataaaaataaagttgatcaacgtcacccgcacgccgccgaacttatcggaaatagcaccaccaacgctccgcgcgatggcaccgataaatgggccaaagaacgccaggcgcagaatattcacatccgggaactgggtttttgccagcatggcaaaacccgcagaaaaaccgataaagctaccgaaggtggcaaggtaaagcaggctcagcagccagagatgcaggcgttgtaagacagggagctggtcggcaatactggcgcgactactggcgatatcattcatcccactccatgcggcgatcgtggcaatcgccagtagcggtacccaaatccatgcggcattcgccaggctcatcacgctaccgtcggcctgcggtacgccattgacgccgagaaaggcaaatacaggtacaaaaatgaccagcggtgcaaccagctgcattacacttacacctaagtttcctaatccgccattaatcccaagagcgctcccttgtttggcttttggaaagaagaaactgatattgcccatgctgctagcaaagtttgcacctgcaaaaccgcatagcaaagcgataacgataaatatcccaaaaggagtattcggattttgcacggcaattccgagccagacgcaaggaataatcaggattgcagtactaaaaaccgtccatcggcgtccaccgaatataggcaccataaaggagtagggaacacgcaataatgcgccagaaacggagggtaatgcggttaataaaaagagttgatcggtagtaaaattaaaaccgattttattgagattaacggtaactgcgctaaatagcatccagacacagaaggcaagaagtagacaactgacacttatccagagatttcttcgagcaatatgttttcctttattttcccagaaggccggattttctggtttccagtcgcgcaaaagataacgactatttttctcattttgcagtgccatattgttcctcacatgcacacattggtaatgaaaaaaagacaaaacacgaggtaaggcgcaatagccagttattagaattaaggatgaattgggtgaagtgctgattgaaagaatagataagaaagcgtaaccgcgggggcagaatggggattaagtagccagatatgtgttactaaatgtaactaacaagctaaccttcaaacggggttaatctttgaacgtatgtcatgtttcaacccttcagatcgtgaatctaaagggttacatattaactatattatcaacaagaccagacacttatagaattagtgatgatttattcattaaaaaggccaactactggaggaaaagcttctgtccagaaggtctatcggttcctctcttattgcctgattgtaataatcgttattacagtaagtattgtttatttcatctaaggtcatgtttttaacttttatattcatctggtttacaacttcctctgtcttgtaagtgtgtatattatatggggtatatgcttttttaataggatagtgaaacaattcgttatccacatctattccgtcagagtgaacttcaaatgcaccagggctaagaattgccaggccagtattaagcttaagtgctggggaaaacaaattaaataacatgagctgcatagtagggcaattgttcttcccagaaacatttaaaaaatttaagttttgctctgttttattatggggaataaagttccaatatcggatgtattattagtatcaatgtgggttattttattattgtccagtcttaaacttttgatagatggaagataagtcaggaaatcaagatttatatatttcaactggttgttagcagcgtttaatgtctgaacattgcagaagttgctatagaatattttaatttcagaaagcaaattgttgttaataagtaacgtattcaagttgggaaataagtcattgtgtaaacttgttagtttattatgggatagatccagcagtaagagttcatttttattacctgcaacaatatcagttaattgattatggctgagattcaggtattgcagccattcgcaagattctaattgcacaaactctagttgattatgtgccgcactaaaataagtaacactactaagcctatctatatcaatatttctgagagcattattattcatagatatatgtgtaatacttacatttctgccttgaggaaaatttatactctcaagagcattactattcagacttagctttacgagtctatcgtagttggttgcatcaaaatgtgtgaattggttattatcaagattgatagatgtgaagttttgcagccctggtggttgagtggttaaattaagtccacttaaatcaatggtcacttcattagtgtcatcaattatatttcttactgcagtccagtactgcatttgtgcaagtggatcattgttgatgccgttaactaatacatgccaaagatgtttactacttattagttgatcaatgtcattggttggcagtaaattgttattgcttaagtttaaatattccagttttgtagtgtttttggcgtttaaatgtgcaatatggttgtcgtttaaagtgattgttttcatcctgggatgattgtgtaatataaggtcagtgatcatattgtgatgggcacttaactcaatcagagattcttgccgcggctgccgttggcttcatcgttatagcctttaaaatcatattcccagtgaccaaaaccaatcatttgatcattgatttgcgtttctcctttaaagccgagacgggcataagttttatcaccatcgtcacgcttatcatcagtaaaataacgtagagcggtaaccttgccataaaggtcgagtttattaccatccttgttatagacttcggcagcgtgtgctacgttcgcagctaacaaaccagttacaaccaccgcaactatttttaatttcatttaacagaatccttttaattatcgttaaacgtattttctaaacgaattttaaacggcgtcatttataaatgacatactgtttttaaaatagaatggtgattaaaaacaatgagaaaaatagatgaaataatattatttatcgatatgtgatcgaagtcgaaatgagatataaggtgaattactggtatttgaaatttatttttttaatattgtcggaatttatctgattaactaccgggccgtagacccggcagttattttaaccacgacgtgtcgccagccagcagagcagggaaccgccgcagaccatcagcgcgccttgccagaagctgaagctcagcggggcgctgagcagcacggctgcaagcgcactggaaagtacaggcgtaaaatagctacctaccgccataatggtgacattgccatgcaatataccgacattccatgcagcataagcaaatcctaaggtaaatgccgcagagatgagtttaatcatgacgggcgtgctaaatatcatttctggttgtggcgtaagaaaatagtaaacccacagacttgctcccgttagcaggacaaaaacggtaattccattaaatccgcgtgcgtatttattcgttactgtgcaataggctgcccagataaacgcaccaatgaacgccaggaaataactcaatgggctggtggtgatattattgatgatttcatcataatgtaacccattgtcaccgcctaacacccaacagacgccgacgagggctaataataatccaggtacaatcaaccagttggttttctgaccattaaacagaatggcaaagagaattgtcaggctgggccacagatagttcaccatacccacttcaatcgcctgatgatgggtcgccgcataccctaaggaaagcgccagacagatttcatagctgacgaataacagactcccggcgagtaaatagcctttcgggatttgccgaatacgcggaaatccaaccgtgaagattaacagcagcccgcttaaactatagatagcagctgcgccgccgaccgggccgagcccctcactgacaccgcgaatcaatcctaccatcgtgctccacaggacgatcgctatcagccctatgagcgttgctttttgtcgtgtcatgctcgctgttttgtctctcttgccgttaaaaattaagctgaattttatagcatttttttaactggcctgtcaggcagtggtgcgtttttctaccgctattgaggtaggtcaatttgcgaaggcggattattttgtggcaaacagatgttctttttgatttcgcgcaaaaagattcagaattttactgttagtttcctcgcgcagtaatacccctgaaaaaagaggaaagcaatggacgtcagtcgcagacaattttttaaaatctgcgcgggcggtatggctggaacaacagtagcggcattgggctttgccccgaagcaagcactggctcaggcgcgaaactacaaattattacgcgctaaagagatccgtaacacctgcacatactgttccgtaggttgcgggctattgatgtatagcctgggtgatggcgcaaaaaacgccagagaagcgatttatcacattgaaggtgacccggatcatccggtaagccgtggtgcgctgtgcccgaaaggggccggtttgctggattacgtcaacagtgaaaaccgtctgcgctacccggaatatcgtgcgccaggttctgacaaatggcagcgcattagctgggaagaagcattctcccgtattgcgaagctgatgaaagctgaccgtgacgctaactttattgaaaagaacgagcagggcgtaacggtaaaccgttggctttctaccggtatgctgtgtgcctccggtgccagcaacgaaaccgggatgctgacccagaaatttgcccgctccctcgggatgctggcggtagacaaccaggcgcgcgtctgacacggaccaacggtagcaagtcttgctccaacatttggtcgcggtgcgatgaccaaccactgggtggatatcaaaaacgctaacgtcgtgatggtgatgggcggtaacgctgctgaagcgcatcccgtcggtttccgctgggcgatggaagcgaaaaacaacaacgacgcaaccttgatcgttgtcgatccccgttttacgcgtaccgcttctgtggcggatatttacgcgcctattcgttccggtacggacattacgttcctgtctggcgttttgcgctacctgatcgaaaacaacaaaatcaacgccgaatacgttaagcattacaccaacgccagcctgctggtgcgtgatgattttgctttcgaagacggtctgttcagcggctacgacgctgaaaaacgtcaatacgataaaagctcctggaactatcagctcgatgaaaacggctatgcgaaacgcgatgaaacactgactcatccgcgctgtgtgtggaacctgctgaaagagcacgtttcccgctacacgccggacgtcgttgaaaacatctgcggtacgccaaaagccgacttcctgaaagtgtgtgaagtgctggcctccaccagcgcaccggatcgcacaaccaccttcctgtacgcgctgggctggacgcagcacactgtgggtgcgcagaacatccgtactatggcgatgatccagttgctgctcggtaacatgggtatggccggtggcggcgtgaacgcattgcgtggtcactccaacattcagggcttgactgacttaggcctgctctctaccagcctgccaggttatctgacgctgccgagtgaaaaacaggttgatttgcagagctatctggaagcgaacacgccgaaagcgacgctggctgatcaggtgaactactggagcaactatccgaagttcttcgttagcctgatgaaatctttctatggcgatgccgcgcagaaagagaacaactggggctatgactggctgccgaagtgggaccagacctacgacgtcatcaagtatttcaacatgatggatgaaggcaaagtcaccggttatttctgccagggctttaacccggttgcgtccttcccggacaaaaacaaagtggtgagctgcctgagcaagctgaagtacatggtggttatcgatccgctggtgactgaaacctctaccttctggcagaaccacggtgagagcaacgatgtcgatccggcgtctattcagactgaagtattccgtctgcctagcacctgctttgctgaagaagatggttctatcgctaactccggtcgctggttgcagtggcactggaaaggtcaggacgcgccgggcgaagcgcgtaacgacggtgaaattctggcgggtatctaccatcatctgcgcgagctgtaccagtccgaaggtggtaaaggcgtagaaccgctgatgaagatgagctggaactacaagcagccgcacgaaccgcaatctgacgaagtggctaaagagaacaacggctacgcgctggaagatctctatgacgctaatggcgtgcttattgcgaagaaaggtcagttgctgagtagctttgcgcatctgcgtgatgacggtacaaccgcatcttcttgctggatctacaccggtagctggacagagcagggcaaccagatggctaaccgcgataactccgacccgtccggtctggggaatacgctgggatgggcctgggcgtggccgctcaaccgtcgcgtgctgtacaaccgtgctagcgcggatatcaacggtaaaccgtgggatccgaaacggatgctgatccagtggaacggcagcaagtggacgggtaacgatattcctgacttcggcaatgccgcaccgggtacgccaaccgggccgtttatcatgcagccggaagggatgggacgcctgtttgccatcaacaaaatggcggaaggtccgttcccggaacactacgagccgattgaaacgccgctgggcactaacccgctgcatccgaacgtggtgtctaacccggttgttcgtctgtatgaacaagacgcgctgcggatgggtaaaaaagagcagttcccgtatgtgggtacgacctatcgtctgaccgagcacttccacacctggaccaagcacgcattgctcaacgcaattgctcagccggaacagtttgtggaaatcagcgaaacgctggcggcggcgaaaggcattaataatggcgatcgtgtcactgtctccagcaagcgtggctttatccgcgcggtggctgtggtaacgcgtcgtctgaaaccgctgaatgtaaatggtcagcaggttgaaacggtgggtattccaatccactggggctttgagggtgtcgcgcgtaaaggttatatcgctaacactctgacgccgaatgtcggtgatgcaaacagccaaacgccggaatataaagcgttcttagtcaacatcgagaaggcgtaagggggcgaacagatggctatggaaacgcaggacattatcaaaaggtccgcaactaactccatcacgccgccttctcaggtgcgtgattacaaagcagaagtcgcaaaacttatcgacgtttccacctgtatcggctgtaaagcctgtcaggtggcgtgtagcgagtggaacgacatccgtgatgaagtggggcactgcgtcggggtttacgataaccccgccgatctgagcgccaagtcctggacggtgatgcgctttagcgaaaccgaacagaacggcaagctggagtggctgatccgtaaagacggctgtatgcactgtgaagatcccggctgcctgaaggcgtgcccgtctgctggtgcaatcattcagtacgctaacgggattgtcgatttccagagcgaaaactgcatcggctgtggttactgcattgccgggtgtccgtttaatattccgcgcctcaacaaagaggataaccgggtatataaatgcacgctctgcgtcgatcgcgtcagcgtcggccaggaaccggcttgtgtgaaaacctgtccgaccggggctatccacttcggcaccaagaaggagatgctggagctggcggaacagcgcgtggcgaaactgaaagcgcgtggttacgaacatgctggcgtctacaacccggaaggggtcggtggtacgcacgttatgtacgtgctgcatcacgccgatcagccggagctgtatcacggtctgccgaaagatccgaagatcgacaccagcgtaagcctgtggaaaggcgcgttgaaaccgctggcagcggctggctttattgccacttttgccgggttgattttccactacatcggtattggcccgaataaggaagtggacgatgacgaggaggatcatcatgagtaagagcaaaatgattgtgcgcaccaaatttattgatcgcgcctgtcactggaccgtggtgatttgcttcttcctggtggcgctgtccgggattagcttcttcttcccgacgctgcaatggctgacgcaaaccttcggtacgccgcagatgggacgcattttgcacccgttcttcggcattgcgattttcgtcgcactgatgtttatgtttgtgcgttttgtgcatcacaacatcccggataagaaagatattccgtggctgttgaacattgtcgaagtattgaaaggcaatgagcataaagtggcggatgtcggtaagtacaacgccgggcaaaagatgatgttctggagcatcatgagcatgattttcgtgctgctggtgaccggggtgattatctggcgtccgtactttgcgcagtacttcccgatgcaggttgttcgctacagcctgctgatccacgcggctgcgggtatcatcctgatccacgccatcctgatccatatgtatatggcattttgggtgaaaggaagcattaaagggatgatcgaagggaaggtaagtcgtcgctgggcgaagaaacaccatccgcgctggtatcgtgaaatcgagaaggcagaagcgaaaaaagagagtgaagaagggatataatctcttttgaactttaagctgaaaatggcgctgtaaaaggcgccattttcatattgtagacaacgtaggctttgttcatgccggatgcggcgtgaacgccttatccggcatgaaaacccttcaaatccaatagattgcagtgaacgtgtaggcctgataagcgtagcgcatcaggcaatgttgcgtttgtcatcagtttcaaatggcgctgtaaaaggcgtcattttcatattgtagacaacgtaggctttgttcatgccggatgcggcgtgaacgccttatccggcatgaaaacccttcaaatccaatagattgcagtgaacgtgtaggcctgataagcgtagcgcatcaggcaatgttgcgtttgtcatcagttctaaatggcgctttataaagtgccatttttttattgcgtaaccagacggcgtaatcggctcacatccactgttttttctgcctctgccagactccaggcgttttgcagattcagccacatttgcgggctactgccgatcaccacggaaagtttaatcgccatttctggcgtcaaagctgcttttcctgtcagcaatcggcttgccgtactgggagcaatttccattgctctggcaaactcgcgcagactgacattaagttcgtccagactttcctgaataatgtcccccgggcggggatgattggccattttcattagtgtctttactctcagtagcgttccttcactgggaacactatcattattgttccttcctacgcaacaataatccatttagccatttcatgttggagagtgtgcgatgctgcgacccgaacatggcagtcgcagcaaaggcctcttagtgacggaaatcaatcaccatgcggccacggattttgccttcttccatctcagtaaagatggtgttgatgtccgctaacggacgcagggcgactttcggcaccactttaccttcggcggcaaactggaaggcttcagttaaatcctggcgcgtgccgaccaggctaccgaccacttcaataccatccagcacaagacgtgggatatccaggctcatagactccggcggtagaccgacagccacaacacgaccgcctgcacggacagcatcaactgcgctgttaaacgcagctttagctaccgctgttaccaccgcagcgtgagcgccaccagttttctcctgcacaattttggcggcgtcttcggtgtgactgttaatcgctaaatctgcgcccatttcggttgccagttttaactgctcatcattgacatcaatggcgatcactttggcgttaaagacattcttcgcgtattgcagggcgaggttacccagaccgccaagaccgtagatagcaatccactgccctggacgaattttactcagcttaacggctttgtaggtggtgactcccgcacaggtaatgctgctggccgccgcgctgtccagaccatctggcacttttaccgcgtaatcggcgaccacgatgcactcttccgccatcccgccatcaacgctgtatccggcatttttaacactacggcagagcgtttcgttaccactgttacagtattcgcaatgaccgcatccttcgtagaaccacgccacgctggcacgatcgcctggttttaaactggtgacacctggacccacttctgccaccacaccgatgccttcatggcccagaattacgccggttttgtcaccaaaatcgccattcttaacatgaagatcggtatgacatacaccacaacactccattttcagcagggcttcgccatgtttcagactgcgcagtgttttatacgtaacgtcaacatgatgatccttcgtaacaactgcagccttcatagttcctccttttcggatgatgttctgcatagcaggtgaggcaaatgagatttattcgccactacccagtatggatgagatctgaaaaagggagagggaaatagcccggtagccttcactaccgggcgcaggcttagatggaggtacggcggtagtcgcggtattcggcttgccagaaattatcgtcaatggcctgttgcagggcttcggcagaggttttcaccgccacgccttgctgctgcgccattttgccaaccgcaaacgcaattgcgcgggagactttctgaatatctttcagttccggcagtaccataccttcgccgttcagcaccaatggactatactgcgccagcgtttcacttgcgctcatcagcatctcatcggtgatacgactcgcgccggaagcaataacacccaggccgatgcccgggaaaataaaggcgttgttacactgggcgatagggtagattttatctttccataccactggattaaacgggctgcccgtggcgaccagcgcgttaccttcggtccaggcgataatgtcctgcggtgtggcttccacgcgactcgtcgggttagacagcggcatcacgatcggacgcggacagtgtttatgcatctcacggatgatctcttccgtaaacagcccggtctgtccactgacgccaatcagaatatctggttttacattgcgcaccacatccagcagactcagcacatcgctgtcggtatcccagtcactgaggttttcgcgcttctgcaccagtttggtctggaaaggcagcaggttcggcatcttgtcagtcagcaagccaaagcgatcgaccataaagactttctgccgcgccgcttcctcgcttaatccttcgcgctgggtctgggagatgatcatttcggcaatgccgcatcccgcactacctgcgccaaggaagacgatttttttctcgcttaactgaccacctgccgcgcggcttgctgcgatcagtgtgccgactgttaccgccgcagtgccctgaatgtcatcgttaaaagaacaaatttcattgcgatagcggttaagtaacggcatcgcatttttttgagcaaagtcttcaaactgcaacagcacgtctggccagcgttgtttcacagcctggataaattcatcaacgaattcatagtattcgtcgtcagtgatacgcggattacgccagcccatatacagcggatcgttaagcagctgttggttgttcgttccgacatccagcaccaccggaagggtatacgccgggctgatgccgccacaggcggtatagaggctcagtttaccgatcggaatgcccatcccgccgatgccctggtcaccaagccccagaatgcgttcaccgtcagtcaccacaatcactttaatattatggttcggcacgttttgcagaatatcgtccatattgtgccggttctggtaagagataaacacgccgcgactacggcggtagatctcagaaaaacgctcacaggctgcgccgacggttggggtataaataacaggcatcatctcatcaagatgattgtttaccagacggtagaagagggtttcgttagtgtcctggatgttacgcaggtagatgtgtttgtcgatttcggttttgaatccctgatactggatccatgctcgttccgcttgttcttcgatggtttcgaccacttccggcagtaaccccagcaggttgaagttacggcgttcttccatgctgaaggcactgcctttattcaacaacggaaattccagcagtacagggccagcgtaagggatataaaggctacgctgtttttttgtttttggttccatgtcactcactcttttttgaatatccatccctggggggcttttatcgtctttgctttaccgccagggcgtcggcctcaagtataaagcagataaaaacaaaaacaccattgcgcaggcaatggtgtttaatcgtcattgaggactgatggttatgaattacttttcagcggggcgttttctgccggttgggttatttactacgctggatttgtcaccttcggtaactattttgcgctggttagaaattttatggtccagtccaagaatatgacgtgcctgacggttgcttttcattttaactcctcaatcctgtagctagttttaaggacaacatcgccgtagcgaagaaacacgtgctaaacccctaaattaggttgccgatcaagcatagcaccttaaagcgtagggtgctggccactgaccacataattgatcgtttgctggtagatatcactgaggatgtcgttatcagaagcttcaacccatttggtcagctccatgagaatgtcatcttcagtgacaacaccatgctgtgcccgaaggccttgctcaatggcattaaccagagcgggttctgctgtactattttctgcctgataataagtaaacatagtgattctccgtgtctgtgtatttatggtgtctgctacggatcgcagatttataaagcacattcagcatggcaaatatttgccgcttcgttgttaagattagtcctggttgatgatttttatattttaacaccatgatattcatagggattgtgattggtatgatccgattaatattgatacaatatcttttgggttatatattcccggtaatctattgtgggaatttaatttaagtgcagaagtaatattttcgccggattttattcggaatatcctgcttatcctcgtgctgtttctcacgtagtctataatttcctttttaagcccacaggagagcaacaatgacaatccataagaaaggtcaggcacactgggaaggcgatatcaaacgcgggaagggaacagtatccaccgagagtggcgtgctgaaccaacagccgtatggatttaacacgcgttttgaaggcgaaaaaggaaccaaccctgaagaactgattggcgcagcgcatgccgcatgtttcagtatggcgcttagtttaatgctgggggaagcgggattcacgccaacaagcattgataccaccgccgatgtgagcctggataaagtggatgccggttttgcgattacgaaaatcgcactgaagagtgaagttgcggtgccgggtattgatgcctctacctttgacggcataatccagaaagcaaaagcaggatgcccggtctctcaggtactgaaagcggaaattacgctggattaccagttgaaaagctaaagcattgccggatgacgcgtcaggcgcgtgaatgcctgatgcgttgttagcatctttacagcgcccgccagcaccggagctcacgtccgtcctcccttattgctaaactttgccggacttcacatccgtgggttgccagcgggcaacgttcgtagaaaaaacagccttgcggcaacgtgcggtttcccggcagatccgttttacgtaatgcccattcttcctccagcggtttatcaatggcggggagggaatccagcaataatcgggtgtatggatgtgcaggtgccgtcagcacctgctgcgcgtcgcccagttctacaatctgcccgagatacatcaccgccacccgatcgctcatatgacgtatcacgctgacattgtgactaatcagcacataggtcagcccgtgattttcctgtagcgttaccagtaaattgaggatctgcgcctgaacggagatatccagcgcagaggttggctcatcaagcacaatcacgtcaggctggctagagagtgctctggcaatggcgatacgttgccgctgcccgccggagaacgcatgaggcaggcggtcgagatactccggacgaatacccacctgcacagccaactcctctgccaacgctcgccgctgttgttcactactacgcttagctatccagagcggttctgtgatgatgcgccacaccggtaagcgcggattaaggctagagagcgggtcctgaaacaccatctgcataatgcgttgactgccagaacggatgtactgcccgtggctcggttgcagcatacccattaaaagctgtgcgagggtgcttttgccgcagccactctcgccgacgatccctaaggtttcaccacggcggatctgtaaatcaataccattaatggcatgaacatgttccgtagttttaccaagccagtttttacgggccgggaaattgatatggacgtcgcgtaacgttaataacgtgtcagacacttataacctcctgctgcggataccaacaggcacagcgctggttgttgtcaccacacgctgtcagcgccgggacgttttcacactgtgcacctgccgcatagcaacgatcgcgaaaagcgcagccgtcaggcaaatgggtgaggtttggtaccgtccctggaatggcgggtaatagctggcgtggtactccatgttctggtgcgcattgcagcaaaccaatggtatacggatgccggggatgatggataacgtctgccgtcacgccgctttcaattacgcttccggcatacatcacgtaaacgctatcgcacagttggctcaccacggccatatcatggctgatgaacagaaccgcagttccactggcgcgggctttatgtttaagcaaacgcagtacctgcaactgcaccgtgacgtccagcgccgtagtcggttcgtcggcaataatcaattgcggctcgcaggagaatgccagcgcaatcattacccgctggcgcataccaccactaagctcaaacggatagcggctcataacttccacggcatccgggatttgcatctcttccagcaggtcaatcgctttagctctggcttcccgacgacttattggttgatgatggcggatcacgtccatcatctgaagacctattcgacgtgtcggattgaggtcggtcatcggttcctgaaagatcatcgccactcgtgcgccgcgccactgacgaagctgtttttcccgcgcgttaagaacatcttctcccagcagggaaatctgcccccgatgtacgcaataactgcccgtcggtagcagacgcataatcagcattgcggtgacacttttaccactgccggattctcccaccagaccgacaatttcaccgcggttaatctgcaaggacacattgttgagcgcgtgaacatcaccgttaaaaccggggaaactcaaatgcagttgttgaatgtccagaacgggttgggtcatgactgctttcctcctgctttttagttcaactctgctttcctcctgctttcgggtcaagcagatcgcgaataccatcaccaaagagattaaacccgacggcggtaagcaaaatcgctgcccccggaaatgcgcaataccaccactgatcgagtacatagttgcgaccatttgctaccatcgcgccccattcagcactcggttgttgagcacccaggccaataaatcccaacgtggcggccattaaaatcgcgctaccgatatccaggcttgcctgcacgatcagcggcggtagggagttacgtaaaatatgccagttgatcagatgccaacgagacgcgccaaaggttttcgccgcctgaacataggtatactggcgtacaactaatgcttgcccccgcgccaggcgcacataaaagggaattcgcacaatagcaatagccagcatggcgttaaacaaactcggcccgagagcggcagccagtgccattgtcagtaccaagctaggaatgctcagcataatgtccatgatgcgcatgatgatggcgtctgcgcgtccaccaagcacaccggatagacatccgagtaggctaccaatcatacccgcaatggcaaccacgactaatccggcgagaatactttgctgactgccgaccagtacgcggctaaacagatcgcgtcccacttcatcggtgccaaaccagtgcgccgcagaaggcggcaaaaggcgggcggttaaatcaatggcgttgggatcatgcgtcgccagccacggactaaaaatcatcatcaatagcattaatacaatgatgactgcgctggtcacggtgagcggactgcctttcagcatccataccagttttgcaccgttaaatcgcgtttgtttttgtgggcgtacggcggacgtttcctcgcttagcatcattcaccacctccacgtccgatacgcggatcaatccacaaatagagcaaatccaccaccaggttgaccagcacataagcaaaactaaccacgacggcaaagcccatcactgccgggaagtcgagcgcctgtatacttgttactacccatgcacccattccgggccaggcaaaaacggtttcggtgagcactgcgccatacaacaaatcgcccagcgccaaacccaatacggtaatgcttgggatcaacgcattgggtagcgcataacataaaacgatataccagccgggcaagccgctggcccgggcggtacgaatgtagtcttcactcaattgttccagcatcgcactgcggatctggcgagcgacaattcccaggtgaacgaacgccagcgttaatgccggtaagatgagatgttgcaacgcattgaagaagacttcaccgttgccttcaagcagcgcatcgagcagataaaagccggtaacgtgcgttggtggatccagccagtcatcaagccttccgccgccgggaagaatttgcagatgaccataaaacagcacaatgacgcccagcccaagccagaacgcaggtgtggagattccggtaatggccattattcgcaccagatgatccagccagcgatttcgccagactgcagagagtatgcccagcgggatgccaatcaggagtgccagcagcagggcaccaaaagccagctccagcgtcgccgggaaaaatatacgcaactcttccagcaccggacgcccggtacgaatggatgttcccaggtcaccatgaaacaggtcgctgacgtagcggtaaaactgtacatacagtggctggtccagtcccagttgctggcgaatattttccacgatagcatcgctggcgcggtcacccgccagtaaccgcgccggatcaccagggatcagatggctgataataaacgtaatcacgcagacgcccgccaccacgagcaccagcccccagcagcgttggcgtaaaatactccagaaggtcacgttatttactcatggtattgatattgaagacctgttccagcatgggattgaacacaaagcctttcacctctttgttcatcgccagttggtagtttttctggaacaggtacacataagcagcgtcatcaatgacgattttctgtgcctgctggtagtcccgggtacgctgcgtctggtcggtggtcgcaagcgcattgcgcagtaacttatcgacctcactgttttcatagaagctgcggttacccggcagaccttttttgtcactctcaaaccagtaattcataaacatatacgggtcggcaaaatccggactccagttgccaatcgcaatgtcgtaatcacctttacccactctgtcgcgcatggtggcgttcgccagcttttccagcttcacaatgatgcccagcttgttgagactggattgtgtcgccagagcaataggctcccagttcggatcgttatcggagtagagaaacgtcaggctggtgggtttgctcgtcactttatcccattcggctttggctttcgtttcgtcatggttgtattgcattgccgtcgcatcgtagccccacatgccttccggaatcgggccgcgcatctgttttccgttaccactcagaatgccgttaaccatgccctgataatcggtagaccaggaaatggcccgacgcagatccgcctgattaagaggcgctttgctgttattcagatacagataggtaacgcgcagactcggatactctgccacattgactttattttcctgcttcagggcgttgagttgatccaccggcagcgcatcggcaatgtcaatgtcgccacgggagagctgcaggcgacgggaggcactttcaccaataatttttacgcttacccgtttgaagttcggtttattgcctgggtaatgcggatttggcaccagaactaattgctgacctttttgccagcttttcagcataaatggtccggaaccggcggtattttgcgcgaggaagccgcgagcatcatccgctgcatgttcctttaagaccgccggattgataatggatgcaccgtcattcgccagcgtgtagaggaacggtgcgaatggttggctaagggtaaacttcaccgtatgttcgtcgggagcatcaatctttaaatctttgggaaatgcttctgctggcccctggccgatttttagtagccgctcaaaagaaagttttactgcttcggcagtgacaggtgtgccatcggcaaatttagcattatctttcagggtgaacgtccactctttttgatcgtcagacgctttccagctacttgccagatcgccttcaacgtcggtactgcctttatcaccgtccgttttgtactgaaccagccgctgataagacgggtaggtcactgtccagtcgttattatctattgttaccgccgggtcgagggtttgtggatcggcggccttaccaatcaccagcatatcttttggtacggcggcgtgcgcaaccgggaaatttgtggcaaggacgagcgcgagcaatgtgggacgaaagcttatgcttctcttcatgacagtttcctgattaactgacgtgctgtgtgccaggggatataaaacaagagaattgatcagcgagcagagggtaactcgctgcctggggtaattcgaagtgccaccattcgctggagataccgacaaaaccgccaccagtcattatcgcattcagcaacagccgattgcgctgagcggcgggcgggacggaagggtgataggcatgggagcgctcgtgcatttcatcgaaccctgcgcccatatcgaggatgttcccgtgctcatcacgaagcgtcaggtcgatcgccgtgccacggctgtgattagaaccgaccgtcacatcaacaacatattgcgggtctgggcaggcttgccacaacatcgcctgtgcttgttgtgggcgatacgcatcgtaaatcaccagttgtaacccactcagctgggcgatgctgatacttttcgccagcgcggtaatcgcatccttgtgtaacagacaacgcgcttgctgataaatagctttacctgtgatgttatcagcgcaggcgtatttcaattcgatctccagatcagggaagattacggctaaatcaaccagttcggtggtatcgctcataaacggttcctgtataagacaaaaattgctgcgctttccgcttatgcagatctcatgccatgccgggataagcgccagaatgctggcttaaagttatattttttaacttttgatcaacatttgtgcagcgtagtgcagttttggtgcaagaggggaagttaaggaaggaatctcccggaatcgtagctgaaatcacagtatttaagtgacagtgtcacgttaaatgaaaacccgcgagtgcgggcgagaggaatttgtcagattttcagcggtaacacgctgctcatccagcctggaatttcttcggcgggtagggggcgggaaaagaaatatccctgaataacgcgacagtggatcttgcgtagcatctcaaattgctctttggtttcgacgccttccgccacgacggttaaattgaggctttgcccaatgctggtaatggcttcaagtaaggcaaggatgcgtttttcggtcagacaacgatcgacaaaacttttgtcaattttgatttccgttaccggaagactgactaagcgggataatccggaaaagcccgtaccaaaatcatctacgcttaagcccacgcccatatcacgcaggatctgaatgcgcttaaagatttcggtatcgtgttccatcatcatgctttccgtgatttctaccgtcagctggtggccgtcaataccccaggcgtgcattgcatcagacacctgattaggcagttgattactgcgaaagtgcagcgcgctcaagttcacggataacgccgggatatgaatattctggctacgccattctgctaactgacggcaagcttccgcgatgacccagcgcccaatattttcgatttcaccaatctcttctgcgagaggaataaaccgactagggggcacatgaccatgcaggggatcgtgccagcgagcaagggcttcgatgccgtacagttcacccgtttctgcgaagatttgcggctggtaaaccagtttcagttggttattgctaatcgcttctttcagcgctgcgcctaaaaccaaacgctcttttaccatttcgttcatcgccgggctgaagaactgccagccgttaccgccattcttgcgaatataatccattgcattgtgagcagtggagagcaagtaatcgcggtttttacccaggtcgtagctgatgccaatactcaaggtaagcgggaagggtttatcgtcaatcattatcggcttgctgaccacattccgtagctcatcggcgatttgggtaatgttactgacgtcgttttcgaggctcacgaggacaaactgcgtaccttcgatacgacagagatactgatccggtttgagtttttcacgaaagcgattgaccacttccagcaatgcctgatcggcccacgcatagccaaggctatcaatcacatcctgaatatggtcaacaccgatgagatacaccacgggagagacggctttgtcgaccaggtcatcgaggtaattgtgcaggttattgcgatttggcagaccggtcatcggatcaaattggatgagttgttcaatatgctgacggcttttttcctgttccagcgccagcgcggccatatgctggctgatatctgccacgcgttcgataaaggcgctggtttctgctccactgctggttttaatttgcaggatccccgcaggcgcgccatcacgctgacgaatggtcgcactccagctttgcgcattttgaatttctgcaccgtgggaagaactcgcccagtgtatcggcatcccgttgcgcagtgcgaacaggctaacatggctttcgttgagtacagattcgatgttacgacaaatgatttcccccatttcatgaaatggcgggctgctgcacatggcggcgagaatattgccttcaagctggcgaatctgccgttcttcggtgatatcgctgaaagtcattaccaggttctgcagatgcgcgagcacgtcataaaccgggctgatagaggctttaatccagattttttcaccggtgcgcgtcaacagcagaaattcgtcctgatcgcgggcggttttccatagcaactgttgtaaacgaatgcggttatcggcagggaattcaggaatgttcaggagtgtatcgggctgcataccgctggcttcgctaatgcagtaaccaaacatttcggtaaatgcgcgattgcactgcacaatatggcgttccggatcgaggacaatcaccggtcggtcgagatggtcaacggcaataatcaattgtcgggtctgttctttttgcgccatttctacgctggcatcccgtaccagcgccaggtaataaactttcccctcggcgctcactttgcttagcgcaaaacgggtccagattttactgccgtcttttttctccagctgcagctcccgactcatcccctcaacacgcgctttaccgccttcacggttgtgacgaatgtattcaggatgcgcaggacgcaaatcccgcggaatcagcatatcaatgttattgccaatgacttcttcacgtttgtatccccagagcttctctgcggcggggttgaaaaacatcacttcatcattttcgttaattaacaccgcacccatcatattttgctcaagggcggggaaaaaaatgccatcggcggcattatccgcatcggttagcttcatgattacctctgcatcctggcgcatttaaagactggctttccagagttcaacacggtttctacctcgtcttttggcgatatacagagcttcatcggctatttgaatgaggcgctcatagtcaggatgaccattaaacatggcggcaccgatggaaagactgagggcaatatcttcgccgtttgcggctttcagtttggttttctccacccgactgcgaatacgttctgcggtacgtaacgtttcgttttcagaagcttcagtcaaaacaatgataaattcatcgcccccgtagcggaaaacataatcactactgcggacgttgtcataaaaggcctgagagactttacgcagaatttcatcaccagtgttatggccccacgtatcgttgatctctttgaatttatcaacgtcaataatcagcacactcagcggtgtaccggtccggttggcatgggcaatttcgcgtttgaagatagtcggtaggaaacggcggttaagtaatttcgtcagtacatccataccgacttcgtggcggcttacttcttcaaacaattcacgcagcaaggtaataatttggcttacggtatttcttatctgtaataaaaatttcacccgcagacttctgttattcaaatttctggtgttacgcatggtttgattgaaaataccgtcgaaatcctgaatcagacgggagatatggcctacttcggcaataccactaaaataatgtcgacctttatggttaaaccacaggccaaaatcagcctggcttaaaggcaaactactgcctaaatcagaatccagcaggattttatagataatatctatttcccaactaagtatactggctatttgccgttctttttcttcttcggcgttttccagtaagctgaagatacgatagttttcatcttccttactggcactactgtcactaaaggtaaacgcgcgagtcatcacttccatcgcgatatcaatactgttaatgctgaaatggtagacctgaagtttttctgcggcggaataatcgctagagaagatcaccggatagaggatttttttcagcacccgaaaccccatctcgacaatttctaccggaattcctatgcgggcatgcacttccgcgacggtatgctggatttgtattagcctttcgacatcgtcaacctgggcagaaagcacgttaataatccagcgttccatcgcactcttcaactgccgctcaacttgttcattactcaagaattcttcggcatgcgggtcgatgcggacaattcgataaaactcgatactcagataatgagcatgcgcaacggcaatttccgcggctttagcacgaatgggcggatctgcctgttcgacaagtccggtccactcatctttcattcttttaaaatacatctccataattcacacccttataaggctgggaaatcagacggaatcaaaatgaaacgcaacgtgcgagatcgactaactgcaccatattctcctgaaatatgaagatatactgaaaagaaataagcgatttaggacagtttcaatctacgctactgttcttcagaagagtatagcccatcgtaattatttttcggtgacagcgaatatcgtatggtttttcatattcatacatttttattagggatttatggctgtttaactaagtgtggttaatttgacttaagtaagcatgattattagtgggatagtttaagagggtaacaagccggtgggtaaagcaccggcttgttacaaagtaagaatgggagtttaactgccccagcgactttgcagatagctgaccgcttgttgagtctgcggtttattcagatagtcctcacggaacaagatggtgccgctaatttcgggcacagcatcgttaagatcgagctgctttttcagttccggtacgccgccgttaatcatccagtctggctctatcttactaggttcacccactttatagaaggcgataccgatatacaggcgggtcctggtcggtttaacgacatccgcccaccattttgccaacacgtcataacgcgcggcactccgactgaacggccagtaaatttggggagcaatgtaatccagcaatccttgttccacccatcgacgggtgtcagcgtaggattcgtcataggctgccgcgcctcgggtatcggaaccgagcggatcgtgacttcggttacgccacacgcctgccgggctaacaccaaattcgactcccggcttaatgcttttaatggtgtggcttacctttgcaattaactgctgagtattgttgcgccgccagtctgctttactcgcaaatgcgcctccgtatttacggtacgtttcgttatcatttagccgactacccggactctccgtatagaaatagtcgtcaaactgcacgccatctacgggatagcgggaaaccacttctgcgactatacttgtgatccagtcctgaacctcagggatgcccgggtcgaggacaaagcgatcgccagacgttctgatccagtcgcggtgttgcacatagacgctcgccggttgttgagacagagtgctattcagttccctgatagtaccgggcttcgtattaacgcttacgcgataggggttaaaccaggcgtgtactttcatcccacgcttgtgggcttcgtcgagcataaattgcagcggatcgtaacccggattttcaccaatcttaccggtcataagatcggaccacggcaaaattttgcttggccacagggcggtaccgtccggcttgacctggaaaaagaccgtgtttatgccgagacgttgcagatgatccagtttgtcgatcatcgcctgttgttgtacacgggcccggctggtggggttactaatgttaacgctggaaaccggtggccagtcgagccgagaaaccgtggccagccagatgccacgcatcggttgactgctttgttgcgtcgtggctggtggcttactacctgctggtggtgtcaccatggactctggaggcgtgcttttacaactacacagtaaaagtgccagtgcaactagtatcgctggtcttctaatcgttaatttcttgtttcgggagcagatatccatatgtgctggtttccggtaaacagatgtgcgctcattctcgtacttatccccgttaagtcaatacgacagcaagcacgaaaaagggagcgatgaattatcgctcccttgtcttataaccattcagacatggttagtgtttcttgtcattcatcacaatatagtgtggactacgtgcacgcgggtgcagggagaagtgaccttttggtgcgttctgactgttgattggctccagagtgacgccggtatttgctttgcctttacgatcatgaacagcatagagaataaagggcagggcaagtaccaccaggaaactaacaaccagtaattcaacatacatatcggtagaatcaccctggatgttatccggcggcaggaaggaaacaataaacgccataatactagtcagcagaccgacaattgccacgaccagtttcacccctttaccaccagggatattaaatgtgcgttttaagtcaggatgtttaagaaccaacacaatgtagccaataaacagcatgaaataagcacacagataaatcaccaccgtcagcgccagtgcgatcaggaaggacatgttgttaccgccaccggtattggtgaggatgatcaacgcgatagacgtaatcaccagctggctaatgaccagcgttaccggtacgccatttttgttcattttagcgaatgccgctggcagcaggtttttctgcgctgttacatacatcccgcgagaaggaccaacaatccaggaggcgatttccgccagaacacccagcaacagcagtgcggagatcacgcgaaccgtccactcaatttctggtgccacatgggacatcagaacggtaaaggtttgcattacccctgcggagaggttgatttcattacccggaatgaccatcgcaatagacaaaccaccaacagagcttaagcagattgccgccaccatcagcagtaacatagccaacggatagtcgcgccctgggttgctcatttcattgacgtgggttgcggatgcttctacgcccatataactcaaaatgaaggcaacaaatactaccagggtgcccactttagagaagtcagggaagaaggtcttgctatccatttcgatagcaacgggggcaccggagtgcagataaatagccgctaatgcgatcaaaataaatgcaggtaacaggataccggcgaagaagccaactttagcaattcgcgccgtgtatttcgtgccaccaaactgcgttaatgccagcgcccaaagaatgatgagtgctgcaatagttttggtaatggggtcttcattcagcgctggccatttcaggatgtaggagagtgcccctaacacgaaatagagcatcggaataaaaccaatggcgatttgcagatagccaaaactgatcgctgcaaatccccatctcggccccagagtattacttacccaggcgaagacaccaccttcttcccagccgtcgacggtggccatttccgcagcacaaagtcccacgggaataaaccataaaatcccgcctaatagcaggaagaagactaaactaaagccgcttgttgcgaaggtagggtattcataaacagccattaccatgcttgccgttatggcaaagaatccaagtaatgtgagctgcttagctttacctgtctgtacacttgtagccatattatccccctaaaacggtattcctgtcggaaccgcacctgttttgttctgaagcgtattcagaacaatattttccgttgctaatgccagtgaacagactttggaaattgtcccgaaacgggttcgtttcgggacaccgttaccgttaaacgttatcaggtatgtttaaagctgttctgttgggcaataccctgcagtttcgggtgatcgctgagatatttcagggaggctttgtagtcttccagcaacagttcagcaaagtccatttcgaagccgcgacgacacataatgcgcatcaccacgatgtcggtggcttcaccgccgagagtgaaggccggaacctgccagccgcgcagacgcagacgttcagagaggtcatacagggtgtatcccggatcttcaccatctttcagtttgaagcaaaccgccgggatgccttcgtccgggcgacccgtacagatgaactcatacggccccagtttggcgatttcatccgccagataagcggcaacctggtaagaggcgttctgtactttggtatagccttcacgaccgaggcgcaggaattcatagtactgtgcaattacctgacccgccgggcgggagaagttgatggcaaaagtaccaatttgaccacccaggtagtcaacgttgaacaccagttcctgcggcagcgcttcttcgtcacgccagataacccagccgcagcccagcggagccagaccgaatttatggccactagcactgatgcttttcacacgcggcaggcggaagtcccagacgatatccggggcgacgaacggtgccaggaagccaccgctggcagcgtcgatgtgcatgtcgatgtcgataccggtatcggcctggaatttatccagcgcatcgtgcagcggttgtgggaactcatagttaccagtgtaggtcacgccgaaagtcggcaccacgccgatggtgttttcgtcacaggcttcaatcatgcgtttcgggtccataaacaactgaccggggcgcatagggatctcacgcagctccacatcccagtagcgggcgaatttatgccagcagatttgtaccggaccgcacaccaggtttggtttatccgttggtttgcctgcagcttccatacgcttgcgccaacgccatctcatcgccatcccgccgagcatacaggcctcggaagaaccaatggtgttggtgccaacggcctgaccatttttcggcgcaggcgcatgccacagatcggcaaccatatttacgcaacgcaggtcgatggctgcggattgcggatattcttctttgtcgatccagtttttgttaatggataaatccatcaatttgtggacattttcgtcgtcccaggtctggcagaaagtggccaggttctgacgagcgttgccatcaagatataattcgtcattgataatctggaatgcgacatcgtcgcgcatttcgtgcagcggaaaacgtttactttctgcgatagtggaaatagacttcgcaccaaaacgactatcgagtagttcgctccttaaatccgttacttgcttcttatccattttaaactccttaaaatgattggatcgcattaaaaaagtaggatttatcgataaagtaagcaagtgcaaaggactcgtgtttaaataacaaaatcctaatgttatttatcgtgagatattacgcgaataatattttttcattgaaaaacaatacaatatgaaattcttgggtggtggtaaggtgttttatgctgttatttttatgcgcattctgtgtctcctgaattatcacgtaaaaatcagaccttaaaatatcactattagtacttgattattattttgaacgcatttataaaattattacataaaaatagcgaatattgctaaaatccccgccaacgatgtgttgacggggctgttattattttggcaataatactccggtataagtatttaccggatgagaaagatattgtttaacggcagtgttaacattctctaccgtcatttgtttcaacaattgctcctgctcagtccatgctgcaggatcgtcatattgaataagactatttacaatagtgttcgctaattgttgaacgctacgctgttggatatcgaggctgcgctgaacgttttgctggtattcattcagttcttgctcactgatccctttagccagacgcttaaccatcacttcattcgctaacgttaacagttcatcatgtcgttctggttgacaagtaaaagccagcaaatgactgatatctttggcctgaggatcaacgctgaggcgagaagaaacgctgtatgctccagatgcctgttcacgaatattaacacgtagatcttttgccagtgcgacgttaaaagcatcgagcgccatacgcgtcggcagattaacaggtgtccgggaatcataacgcttccactgactaacctgtgccacaggttcattttgttcttttacagtaacgcttgcgttgtccgtcgcgcgagttaatggtttacctgcggctaatgggctatcagagtgtttgatacttcctaagtaacgcgtaattaacgccacgagtttgtcttctgcgacattaccgacaatgacaaacgtgatatccgctggagaactaaacaattggcgatcggcagccagcgcatctgcggcagtaaactgtgcaatctgattttcttgcagtaatttcgtgcggtcatcagcatagcgcgtctcatacatctgctgggcgaatttctccgctggacgctggtcgagcgttttcaacgcctgaatttgagcattttgtaggcttgcccaaatattatcgttaatcgtgctgtgggtgattcgctggttaatcaactgaaaaccaggttcagggttattagtccgcgcgctaacggagagcaacgtattcatgccactgactttactgctcatggttacgctattttccgcactccagcgtttcaggctggaagaggagagttcgccaacgccgcttccgctaactgctttatttgccagcgcgataagacttttttgctgcgcagggaaacttaaatcgcctttattgcttacggcaataatttgtagcttttgctcttcacccgcggattttgccagaataaccctggcaccattggaaagtgttaaacttgtcagattctccgccagcgtttctttgctgctaatttccgcctgtgggtctgcgtctactgttaagcttaaatttctgcctgggaagacgtaagccgccagctttttgttggcgtactccttttccagcgccaggatagccgcaggagacaatgcttttttggcggcaacctcattgtttaccatttgctcccaaaatgcgtcctggttctttcttaactgctgccatttttccgccagactttgcacggtaatttgctgccacagacgtttgctaagttgatatgtctcttccgggctcaagaacggcgtattatttaaactgctggatgccaggcgactggtcagcatacgtaaatcacgttcagcttgctgatcaaccgcatttttcagccaggtgaggcgggtagatttgacatcatcgagttcttcagcagaaaaaccatgctgatcaatggttgccaactctgccattaatgcattcgcagcatcctgcatattatcgtctcgtgcatttacacggaaaaacaggctctgataatcgggtgcaattttaacgctgcgcgcagtgccgccagaaatagtcttcaactcgccgctctgtatgcgttcctgcagacgttgattgaacagctgaactaacatgctccattcagcttgttcgataaagctttgctcatcgttcacttgtaccattggcaggcgataatagagtgcgatgccgttcacccggttttctttatcattaatgatattaaagcgcaggtggttttcggcttttgtcggccagacgcgattttcagctgctttgttagccggaagcttacttaaattatcctttatcagcgccagcgcttctttactgtcgatatcgccgaccacgataaaggtcatattatttggttgataccagcgttgataaaattggcgcaattgtgccggtgtgaccgtggcgacagtatccatcaggccgataggttcacggtctaaattacgggtatttgccagcaggaaagggcggcgcgcctgagaggtgcgccatttcgcatcctgatgggcacgccattcctcagtaattacgccacgttcagcgtctacttcgagtttttcaaaggttgcggcattactccattcactgaagattgccatcacttgttgcagattttgtttctgcgtagtcggcaaactcacctgatacaccgtttcgtcatagctggtataggcattaacatcgcgaccaaaacgcaggcccatactctcaaatgtttcgatgactttattacccggccatgtttttgtgccgttaaacatcatatgttctacaaaatgagccacgccgagctcattgtcttcttcctgcaaactaccggtatgaatttgcagccataaatttacctgatcctttggatgagcatgcggataaatcatatatcgcaagccattgtccagttgcccggtaattaacttttcatcctgcggtaaggcggcggcaatcagccgcccggggagcaacagagttgccactaacgtcagtaagaaacagaggtttctcataattatctccatgcgaaaaccgggcgaatttacccggttaagtaaaatccgaactattaaaatttcatgctgacatcaagccagaaagtacggccactggcgtaggtcgccacaccggtgttcgttgtatcaacagcggttttgctatccagtacattgagaatatcggcactgatcgtcaggttttgttgttgcagaaattgtggcgtccaggacaagcgggtgtcccaggtcaggctgctatccagtttttcgtcaacatactgcttgtaatcactatattcgctgatgtattgcgcatttgtcttaccaaggataatgcgagctttacgcgcttcttgccaggccagcgtattcgcccacactaacccgctcggttgatgcgtgaaatccatgtttaaggagatctttaatgggttattaaaatctgccactggaacgctatcgtaagagaccagattaccgttataaaccacctggttatcaccggtattgctctcctcataaccattgtttaagctcaagttgcccttgctcttgatatagctaaagacaatttgtgggttaatatctacctggcggatatgcaggggttcggccagttcaaaactgaggctgaagctatgcgttttggttttgccatcgttgttatattcagtaatggtggttttagtcgcgctgtcggtacgactgcttttgctgatttgatcatgcgcttcacggtaaacatagtttgcacgcgcaataacgttcttaccgattttctgctgcaatcccattgccagttcatcgttataaggcgttttcaaatcctgataacgcgtcagagttttattaccacttacgctttccgtccagctattgcggatatcacgtaatcccatatcaagaatattcccgccatagtaacggttataacctgctgtaatcatactggtttgattagcaaaaatatcccattccgtcataaagcgcggggagatattgtggttactcagatagttgtcatagtcataccgcacgccgggcattaaactcacattacgccagctaatgcgatccgccatatacagcgtgtagttgtcaattcccaggcggcctttacctttatggtaaatggtatggttagttttctttccggcagcattaatcacataggattcagactggttatggcgttcagtccacgcatcggaatagatgtattccgcgccgaagtagggttgatggctaacattacccacggcgaatttttgccagtccaggcgtgttttgaaggtgtaattatctacagcctgggaaatgtgtcctaatccgccacgggtgcaacgccctgtaatatcaccatatgtacaactaagttcggtgtaccagatgtcatgatcgtgacgggtataatcactaatatgatcccaaccaacggtggtacgcagtttggcccatgcgagctgcgtatccatatcccatgccagaccataggatttattacccatttcgcgatcagactgcgggaaggtgctggtattataatcacggctggagccggtatattttaaggttaaatcgtgggtaaagcggtcgctggcaaaccaggtaaatttgcttaatgcagtatcgataacgtttttatactgtgcccgaccggcgacaatgccgtcattgctaacataatccgcgcgggtgatatcagactggcggcggcttaaaccggcggtaacgccgaagttatcagcgagttcctgattaaagctcaaggtataaaagttctttttaaaatctggggagtaataagtacttccactagagccttgattaaatgcgctcttgttattctcatcgatatggcttgttaaccagtcgctacgcgtagtgcgataacccaatttcaccttgctatcatcagcgttgaagcgtttgatctttgcatcaattaccccgccattgaagcgaccaaattcaaccggcacaaaactgtcataaagcgtcacattgtccagtaagctgacatcaagataatacccctgactcatcccgctaatattggttgcactactggcatcggactcattcgctgggttcaggttattagttgcactaataccgtcaatcaaataggcattctggtaggggctcgcaccgtgaatagagattttctcagggcgaatatctccctggttcaagctggtactttgcgtactatccatgcgtaccgcagggttggttctcagcagatcgctgatattgccattcccggtcggtaaacgctcgatgctttcactggtgtaatgcgtgttgccgtttacgggtacagggacaggagcatagaccgtcatctcttcaaaaaaatgcatgtacatgtttttgtcatcgacggcctgcgccacatcagcgccacataaaatgacgccaggaataagaactcgcttcatttatttatatctccgtacagcagggcttttattgtttttataaaaccgcgctaatgtcacaaatatcatcggccaggttccagacaccgggttgatgtgtaaccataatgacgccgcttgtgggtagtttttcacgcactaaacgcagtaagcggatagcctcttgttcctcaagatgagaggtagtttcgtcaagaaatatccatttcggacgtcgtaaaattaatcgtgccagggcgatacgttgtttttcgccgctggaaagaatatctccccagcgatcgtggtcatgaatacgcgcagccaatttcccaagaccaacctgatgcagtacttcgctcaagcttttatcgtctacgggcaggggaagtgctttacaaataatctctttcagtaagccggttttgattaacggtgtttgactcacataccaactgtcagcaggagaagaaatatcacctttaaaccacggccagcagtgggataatgttttaagcagtgtggtttttcccgcgccagagtagcctttcagtaatagccatttgcctgggctaacatgaaagttcaggttctctaatatgatcttattatcaggcgtacgaatactcgcatcagccacttgtaccgcatgttggcaatttttaggcttattcgtagggcgctgttcagtgagttgatggaactcatacaagcgatcgataaccgcagccagttcagcaagttcgtcatatttataaataaaccagcttaaattgttgcttaccagcataaatgcctggcggcttttcatcagtccgcccagattgatctgcccgctaataaactgcggcaataacagaaagtagggaagaacgctaaggctgcggctataaatattctgccagtaatcaagccaccgctgacgattcattaaacgatgccagttctctttaatggtatgaaaattgtcgctcaactcctggcgttgtagagactcagcattgcttagcgcaatcagttctgcctgcttattatgctgcacaagatttgttcgaaatgtcgcttcgctacgttgtttttccacattaagcggacgaatacgtttacccaccttatgggtaaataaagttccaccgatcacaatgagcacgacggtatagaccatatacccctggatattccattctgttccaccaacagtgaaactgagcgtacccgcgctttcccaaagaataacggtaaaggtgatcagcatgctaagactctggatgaagccaaaactaagactgagcgttttgctgatcagtaagagaatgtcttcagcgatacgttggtcagggttatctgtatttttatgctcgccgtagatctgcgtgaagtagtagtttttatctgcaaaccaccgattaaggtagtaatctgttaaccattcgcgccagcgaatagtcagtagtttaattaaccatgttttgtttacggatattaatacaaagatccccagcagggcagggaaccaaaggacaagctgccaaagcttatcggtttctttctggcttagcgcattgaaaaaatcattattccagtcgtttaaccagacctgaattttaaccacgccaaggatcatggcgaggataataatgattaacaacacactagttttattattcttacgcagccaaaagggcttcaacagacagagatactttgctatcaacatacgaagcgtaatgggaatggttatcattagcgaaaattgattgtgccatccaatgattatctatggcaatgatttactgatgaaatttatttaagtatcatttaacaatatgaaatataaaggaatatttcattttcagtggttatggttatgctattgataatcaaggatattgctaatgccctgatgcataccacgtaagccaggattttcgcaagggaagatgatgatgacgaaacacccgacaggaatttatgtcgggtgccttgttaaggtcataagaaggaggctaagaatggagttaaaagagagcgttattaattattctccatttgttttgcaacatccataatgtggtaaagcggtactctgttcttagctaactctaccatggcgttcatataaggtaccatggtactaaaaaggattttataaccttcgcaaaaataagaaacagtctcattgtttactttagtaatacgatgcttaggacaaccgccattgcagataggtttatatgcacattgctgacatttcgctggaatccgttttttttgcgctgtcagttgtacactgttcatcgttttgagttcagatttattaatgtttccaattttgtactgtggatagacaaaatggtcgcattcgtaaatgtctccattactttcaacaaccagattatccttgcaggactcctggaaaatacaactggtatgcccattccccaaaaaacggctgacaaagctttcaaactgacggatgaaaatttcacccacatcgtttttaacccattgcataaaaatggtactcataaacttgccataagccgtgggaggcacagaaaaatcaatgatacggaatgtgttctcactatgaccactgaaatcaatattcggcgtcccggtttctagcaattcgataaattgcatatgtttactgccgatagattttaaaaaatgataaacctcaagagggtaatggacattaacgttattaatgacggttaacgtattaaactctacttgataacttttcagacgctcgatggctgctatcacttttgcaaaagtaccgttaccactattactgcgtctgtaacggtcatgtaactcctgggggccatcgatgctgataccaaccagaaattcatgttctttgagaaaggcacaccattcattattcaataaaatgccattcgtttgtaatgcattaaaaatacgtttttggcctgcatagcgttgttgatagtgaataactttacggaaaaaatccaggccagccagagtgggttcaccgccttgccaggtaaaatagacctgattgccagacgctgcgatatattgtttgatgaactctttcagagtgctgtcatccatccatttttcatgagtaaactggctctctttttcaaggtaaaaacagtaatcacatttgagattacattgaaaactggagggcttggctgtaacgtgcatcgctatctcgctcaataaggcggcggaaaaatccgccgcatgaaggtttagttatttcgcttcgcttagtgctttcttgatattgttaaacttctcctgatttacctcgctaagcggtggctggctgctgtcgataaactctcttaccacgccttgcatctctttaacgacctgcggattggcggcggcaaggttatctttttgctgtagatccgtcagtttgtagagacctaactgattgttttctactgtatagacaaggctataatcgttatttctcaccgtataagagaattggcttaagtcctcagtgttggggttatgcgggtaatcgtcactctgatggcgaacaaatttgtggtaattatcccagaatggaatattttcctcgtcaaaccagtgagaataagaggttatccaggtcagatttttatgtggctcgccttgtttcttatcttgcaaccagggcagcaaggaaacgccatccagcttaaggtcttttggaatgctgatatcggctgcatcaagagctgtcgggtagaaatccattgcggaaatcagcttgtcataattaccgggttgaagttttcctttccaccacataaacattggggtgtgagtaccgccaggataggtctgactcttatagcctttttgcgccccgttcagcggcagaggaccatcgataaccgcaccattatcggaggtaaagagaataattgtattgtcatactgtccgtttttcttcagttgttcgagaatgcgttttacaccctgatcaacagaataaacggaagcgtagtagttatctgctgtttgactaccggtattaaattgcttctgatattgatccggtgcaggattatcatttggcaggtgcggagcattataagccaggtaaagcataaaaggctggtcaagtgttttggcacgatcaacaacgccaattgcctcatcggttaactgatcgctgatataaccttttgcggggacacgttcacgatttttgaacagactaggggagttgtaatatgccgttcctgcagcgtggaatcccataaagtaatcaaagccacggttttgaggttgccattcttccgcagaaaatgtggtgaagttgtcatgatagtcacgcgtttgtttatcttccggtaccggcacattactgattttactcaagtgccatttacctactgctgcagtgtaataaccatgattctggaataattcaggcaagaaagtttctgttagcggaataccatcctgagcatcggtattggaatagacaccaaagcgggcgggagctcgaccggtcattattgcggcgcgggaggggccggaaacaccgtgtgccacatagccgttagtaaaacgtacgccttcatccattaaactaaggagcgtcggcgtacttttttgtgcagcttcaatggctttatctatccctattttgtaggtatcgacaacttcacgattttccattgtttttgggtcaaaagatcccttatcaaaaggaagttgtccataaccaagatcatccatggtcagtacgataatatttggctttcctttggtactgtattctgtcggcgtaaagtcactgaaagcaacgtttgttttggttgctttcagctttacatcatctgccgcatgagcagcaaatgcagccataccagatgccagtatcaaagatatgctggtacttacgacacttttctttaatgcagacttcataaatgttcctcttcttattgtacttaattccaaagtaattttacgaagagaaataagtggatgtaagtgaagttagtcacataaagagatagcagatttagctaaaaaaagggaaaaaacagtccataaagcgttgacattactttctgttctattaagtaatttctcgccgataaacaactaatttattgatatttaataaattattgcattttactgacaaaatgcagaattgagatcataaataatcatgcaacaggttatgcaagtgcataaatatgtgatggatgtcacttatttatttcaataaatatatcgcctaaaaacaacgcggggcagggaatggctgccccatttaattcttacgcagcgtgtgtggttgactactcgttagcaaataatcaaatagctaaagcattcatcgtgttgcccgtattcatacccgtgtgactttgacaacggtactccttagaaactctcttcggactgttgccgaaatgtttgcggaacgcataaataaaataagatgtactggcataaccacattgttcggcaattttattgacactaccttctacgcgtatcaaattttttgcgtgctgcattcttgcatctaaaagaatctgactgaatgtcgtttgctcttgcttaagttttttcttcaacaggctttcactgatgtacaggcagtcacaaatatctttcagcttccatgggtgcgccggcttcatgttgacaatatttctcactttcccagaaacggatagcacaccgttagttaatagtgtaatgaaacctttgcatgcggcaaaaatagacaggcaagaaaaaagcaaaagttcactaaaattatgatgattgcgttcttcgctgttgagataagcaatcatttcattaagcaatccagtcggtacattactagcacgtaaaaacttcgcaggaacaggcaccgtcactgtctggatgttagtgcattgtagatattttttaatggtattttcagtaaatccgatctctttaaaatgccgctcataaggttcaaaatgcgtacgaacagcgttatctaccatcaggatctcgccgtcagagaaggcgtaatctttatctaaaatgttagcgttgaaggcatgatgaataaatataacagaacaaacgaggctcattttatctccttaaaacaataaagtttttatcgatacttttttaacatttcatatttataatttgctgtttgttttcagccttgcaaactattgataatgaaatgtgtaagatctcttgcaatgcgacccatttctgaaatactcagctgatcaattgccgaaaaaatggctatcaacgtaagtgtcagtaataagacaaccacaattgcagacatgatttctttatagttgtctctttgcgtgattttgtttttcactgtggtcgcatgcatttcaaatatgtttatttagcggataacgttaaaaatcgttaatcagtatgcttaatataacaggctggagaaaagaggaaataggactggtgcttcagtactgagcggagtttcttacagctgtaggcagaagtttatatcttatagtatgtagtttaatttaatccatgtgagcaaattgcgaaataatagtcaatgaggaattcttctgctgtgcggatgacagcagaagaaatgagaagaggcattaattacttggttctaattcaaccggaatacttttatagccaggaatgccacttaatggatcgtggttatcaagtgttagcatgtgattgctttctggaaaataggtcaccagactgcggtcagccatagagtaaatgaccacttttaatctatccatgcggcgactgctgcgcttaccgtctggcgtaagcgcaataagattaactctttcgccgttttttacacggcaaattttagcttgtttagcactcataaagaccacatctcgttgaccgaatacccctcgatagcgatcatccataccataaatcgtcgtgttgtactgatcgtggctgcgtactgtcgccatgaccagcttactgttaaacgcactagagggatcttctaacagccctttgctggtaatgaaattagccttaccactcggcgtcatccagcgcctttcagcagctgcatttatcaggtgaaaaccaccgggatgacggatgcgctggttatagtcggcgaactctggcagcacagcttcaatgtcattgcgaatgcgatcataatcttccaccagatactcccaggctaccacgctctggggtagtgctgcctgcgcgattcccgcgaccactgcacactcacttttcagcattacaccggcgggttttaacacgccacggctggcatgaatcatgctcatactatcctcaacggttaccgcctgcgcaccgtttttttgcatgtcaatctcgctacgtcccaggaccggcagaatatagctatgccgtgcggtcaacagatgagagcggttaagcttagtggctacgtgtaccgccaaatctaattgcgttaacggtacagcgctcgcttcccgatctggcattgccagcgcaaaattgccccccatgcagatcaatgctcgagcctgccccgtacatattgcttgcatgctggtaattgcagcatgtccaggtgcatgaggtggggtgaagccatagcgctcacccagacgagccagaaactctgcagacggtttctcggtgataccgacggttcggtcgccctgtacattagagtgtccacgtagtgggcagatacccgcaccaggcttgccaatgttacctttcatcaacagcagattgaccagttgctgtacgttctgggtaccatgttcgtgctgagtgatccccattccgtaacagataatggtgcgttcggcagcggcatatgcgtcagccagttcggcgatttgtgtctgacttagtccagaaatacgttcgatatctttccactcggaattgagaacgtcacggcgtagctcgtcaaagccgacggtatgcgtttgaataaactcgtcatcaagcaaactaggccgacctgcggcgcttgcagcatcatcgcgctcaattaacaggcgcatcatccccttgagcaacgccatatcgccaccaatgcgcacgttatagtaggcactggccaactgagtctcagagttcgtcagcatttcaaacgggttttgcggtgcggtaaatcgctccaggccacgttcctgtagaggattgatggcgatcattttcgctccccgtttcactaaagcgcgcaagctagtcagcatgcgagggtggtttgtaccagggttatgcccaatgcaaatgactaaatcgcacttctcaaagtcttccagcaacacggtccctttacctacaccgatactcgctgccaaacccacgcttgtcggttcatggcacatgttggagcagtcgggaaagttattgctcccgtattcacgggcaaaaagctgataaagaaaggcagcttcattggaagtgcggccgctagtatagaattcagcctgattgggatcactatagctttgaaggcgtgcgccaatttcgtcgaaagcttgttgccagcttaatggcttgtaacagtcgctgacggcatcatatttcaaaggctgagtgagtcgccccgcagcctcaagctcgtggtctccccaggtaagtaaactttgaaccgtattctcagcaaagaaagaggcgtttacctgcttatccgtgacttcccaggcgattgcttttgcgccgttttcacaaatgtcgaaactcgcactgtgcttaggatctggccatgcacaacccggacagtcaaagccctctggcttattcatgtcaaacatggcaataacatcctggcgtatatccatctgcttacgtactgcattcgctacggatttaacagcaccccaaccacctgcagcaccctggtaggattcaatttttttcttcatctacttatcctgtgtggaaatgaattattaggatttgtaatagcgatgatgcacagtacatacaaagggattatcgccaacatggatatataagagtaggggactactctctttctatttttaatctattatcgttaaacaatagattaaatacgataagttaagcatcatctctcatagtgtttaaattaacatatttttcaatataaaaaataagactctggcttcaattgtgcgcggattttcttacaggtgtaggctaatagccttcacaaaataattatccgcgcaattttcgtgaatggagcgcatagactaaggtcaaaatcacaattattcatagataaaagtgacaccaatgacactctggacggttccggcactaaccttgtttcctgtttgtccataggttgcgcttaaacccagaggtactttgcttttatttactgtccccagggagacattttctcccgtagccagtatttttccattacgcattagagtgacacccactccgcttgcttttgttgcatcaggtgctgtgttagcaaacacttgtcggctactgtcagtggtggcaccgctaagataaaaactgagcttttgttcgctactgcaatatacgccaaggggtatttctgcgcttccaggaaagtccgggagatccacggtgacatttcgactatcaacggtgcagccgcctgttggcataacaacattgttattactaataatattccacgtaaaattacgcggatttccgcttcctaatgttgcaattttatacatatgaatacgggcaatgacttcccccgcttttatgacaactccaccggccgccccaactggggtaatatagagttttaacggtaatggcatcggtgtcttatcaccaatatccaatacgttggtatttgtcgtcaacgggaaggggtaggtcacattattccagtacaggcttcctttataactctgtagggagcctgcgaaagcactgccttgtaccaggtttatatgatcagtgtcgtaccagccgccgtaatcattccagcaacttatatgctgagacaagtctacaaccagattctggcccggctgtattacagggtcgagattaacataaacagaggttgtacctgctccaatactactcccgccatcgacattacaactgaaggcaaaaactttgcctgccattaatagaagataaataccgaacaggacctttatactgattgttttacccatgatatatcctaaggttaaaaattgatttaaaaagaaggctaagaaaatcgaatcgacgttattgccaggtgtagatcacattgattagcgcctcgatcgttccctggcttgcgtttccattcaccgtgatagctcttgccttaagtggaaactgtgcattacgagtgatctcatcaacaataaccgttttgctatcgccattttttaacgcagcatcctggtcatccctcagctctatctgaatattttcggcagtaccttcatttttgtaataacccgtattgtcagtactacctgtcacgattgccgtcactgcacttgtttcaaccggacaatcggttaaactcaaagtaatattgtgccagccagatgcagaaccaggttgttgcagattgcgcgtataaagatccccgagattaacgttagcttctttggtttgaatagtgcagggtttagcgactacccgaccattaacagtgatagtgacatcggcggcctggagagttgctgtgaataacgcgcaaaacgtagctaacaggaacctcttgtgaagtcttttcatatctgactctgattattgaaattcaagggtaaaggttgcgctagccctcaccagtcccggattgacggacttctgagtactcttcagacgagcggagtaaggcaaaatattgttctgttctggtaccagtgggatccactgcatcccggcatgaagatcattcagtttcaccggacgcatatttgcgtccaatatttctatacccaaaccggaggccgtattgcttccttcatccagtttcaacaaagtattattttctgcatcctcaataccgttaaatgcaacccgaacccccgttgtccctttgctgcattcacttaacgtaatctgaaaagggacggctggacttgtgctaccggtcgttggaaattgtctggcactgtttttttggagatctacggtaaaattaaggctatcgctactgactgtgcagccataatcgaggacgcgcccgctaattttaataacgctatctgcggataaagcagaataggtggttaaccccagacataaaccgaggaaaataatgttattgtatttcataatctattgttccttagcgacagattgctgtctgctggttcagtaaggtaccaggagaaacttcaggaagcttgtactcgacaatacagttactgtttttatctttgccccaactaacctgtaattgcccactctgtggaagtccagtcagataaacctgaccattttccgcgacaatgctgccatttttattctctccgtgtgtgacaattgcaccgaatggaacgctcttattaccgtacttcaacgtcattaatactttcccgccgatttgtgcattaaatgttgctctggcaatagcaccgtgagttgggatgacagtgaccacggtttcatccagttcaacattatctgcaagggaattcgcgttaagagcaacacggttttctctatattctgtcgcaaatggtaatatggcatagccacgccagtcggtatgaattccggtctggttctctattttgacattatcagcaccaggagccttaaccagaaccattgtgtcgcccagcggctgtccaaaggtgatgccatcagcatgagcaataatcccaccactcattccgtaataaatctggctgctgtcaccactccgactgtaaccgacattagtattaccataagctccacgataattaagagaactgtaaccactagtgccagagcttgtattacctccgtgggtgttaccgacctgaacgctataattcaggttattatccggcagcagagtgccataaaccccgcttagattggtcatgccgcctttcaaatcgttactcatactgtaactggcgttactattacgaaatgcgctctgactgtctgtacgcatccaatgactgaagggaacattaagcgtaaaagcgagtaaatgatcccgatcgttttgccatatattattggaatagctgtaattcaggctagtcgtaatatcaccaaacggcacatttaatccaaaacttatttgctggtcgctgcgactcgtgttccagtaactttggcgactggcactgaaaaatgtcgtaccgtaatttccaagctgctgagagatgcttatttgttcctgaccacgcttactgtagaacagattaaaataatcaataaattgtgtctgctcattggtgtctccggtaggaggcttgacggtgtaaccactcattcgactgtaggcactgtcggataagttataaaaaccttgcgtagaatagcgatatcctgcgacctggatattggttccacaacaagtttattgctgcacttgttgaagagagtatttgcaaaaacattttatgtcgctaaataacatgacgatttcattatgcatgttatttataaaccgtgactaaacagaatattattgcgaacaagggaagtgtcaggaaaggtcaagagctaccaatggttaatatggctataaatcattagctatggttaatgtttgcttgctgaaactaacaccgaattgctctaaacagataagtgcagggtttattaaagctgtccgacagactttcttaacctggtaatatctctcttgggtgactctccaaacatccgcgaatattcccgacactaatgggatagctttcgtaaccgacagcataggctgctgtggtgacatcgtaatgttcattcagcatctgtcgcctgacttcattgagacgtagccatttctgataccggagtggactcattcccgcttgatccgtccttaaataagtaacagcaccctctggtgttttcgtatgcagtgtctatgcgacagacactgcgctcttagcatggggcagggaataaccaggctatttctccatgcacaggccaattatgaaagaggagaggcttaagttcttgaaccctgaacgaataacgactaccagaaaagcacttcgcatcactcagacatgatttaacataatatacattatgcgcaccaatataaaccaaggaagaatccagtcgttggcggtcatgattgtcatgctcattaacaatgaccaaaccccatatctcacttactaccgtattctcggcttaaccgtccatgcaacctcaacacattgctttcaactgccgtcaccacgttctccggaaaatctgtcggtaaactagtcttcacgttatccagtgctgctggaatcattctggcaaagtcactcaggatttcatgcatctgcacttccgggaatctcagcacctttgctgtcgccaaaaaatgtcgcggataaattttatcgattgccgtttttttgcctttggatgcgttaagccccattgccagtttgagatcgctgatgtgtattcccgtaccgccaaggaccggaaatgcactaatgatgtcgtaaaatggcgtgagtcgataactgccgccagcctgaataaatacggagaagttttttgcatgaccgtccgttgcgccaatcaaccactggaagacctggaatttcataaaatcatagcgatctttcagcgcctcgctggaccccatcaaaaaagccatgatccgcgcgatgcctgggcctccatcactttcatatttcacgctactaggtaaaccgaatgtctgacacatatcctcctgtggcaagcgaagtaaaaccgttcgctcagcattccaacgcctgtcaaagcgttcgaccgctaacgcgcgcacatttcccgctttaatgatttctgcgtccggaacattcaacccaagttctttcgccagcagcagacagtaatactcattatcaacgctttggctgagatcgagcgtcgcattgggctgcctgatttcgccaatcggtaatttaatgatgtgcgtcgtcggcgttattcctttcggaatgcaccagtcattgcctattctgagcagtgctgtcttctcctgtgcgccagcaacgctgatgcgaaagtcattttcttctctaatcatgcctagcgggatatctgctttataagccgttaatacttcttcaagtctggcttcagtaagcttttcccatgccattatcggatgcgttacggtttcgtcttcgggtattaacgtcacggcaccaacgctgtctcgccctatttcactcaataaatcaaacggttgtctggatttggcatgataacgtttaacgatccggtcacgtacaatcgggctatcgggtaacaggttatcgaagaagttaaatacggcatcagaggtgatattccccctctgcaatggcaggctaagactcaacggtctggcataacggcttgctaaccactccggtgcatacttaaaggtgtgcgcgccgttggctaacttcgttaactcgcctacccgctggttgttcatccaagtgacaagtttaggcattaccactccagattttgctgttctgtactttctgggctggcatttttcgcgtcgcatagcgtcatactgagttcaaggctctgtaaaatcttaaaaaatgtcgtgagcgtggtattgtcagggttgttttcgaaattggaaatcgtcgcctgcttaataccaatttttttcgccagctcgctctgcgtccagccattttgctggcgaaccagtttcattgcattcgccaattgcgttgggctatagatcttctgaaagctcatcatgtcatacgtccacagcaagtttatccgcttaaggggatattataagttttatcctttagtgaggataagtcaatctggaaacacatcttatccgctctacgggataaacgctgcgatatccgcgatcgcggataaaaaggaggatttaaataaggcgttgatgcgccgtttgaagtcggcaatattaagccgcatgccatctcgacatgcggcttatacggtttaccagctatatttcactcccagcatgccctgagtatcgctatagcctttatcacctagttgcacaccgacattcccccacaggctaaggttgttatttactttcgcctcaaccccggtacgtacttcaccgagattacgcgcaccttcacggcctacggtttgaccattcatcttcacggcgtagactttgctattgttgatccagttcgcttcaatgtaaggctggaactcacgctgtttaccatcgtcacgctggtgatggctgttcaggtaggttttcaccccaagtcgcgtttgcacatttccgtcgccttccgtttcaatgcgcgttccgtctttccgggtatggtcggaatctttcacacccatccaggtgatttgcgcctgtggctggacgtaccaggtattcagcgtcccttcgctgccgctaaatgttcccgcttcaaaggtatacccaccctcaacagaggccgtcacaccgcgagaatcatagtcgtcagcagaacggttatcggaactgacgctgttatcaaaccagttatacagcgcccagctgtcaacataagcgccggtcttattcgcatcgttctgataccaggtcgcgtacagcccagcgctgtaaccgctgatgcgcccatcgcttttataacccacacgattactctgagtattactgtgctgattggcgtagcctgccatcacgccaagatgccagcgatcctgcgcgttgctactccactgcgccaaatcgccgcctagctgcaatacatagcggttagcctgagtatttagctgaccgtcaccggccctactacgttcgtgccctccgacatgacgcatccacatactgcttgcgctcccctgagaatgcagactatctgtatactgcggctcacccagacggtcgtgtaaacgatggctaaacaggctgttggctgcggcaatgttgctgatatagcttccggcctccgggcgataaacacttgggccttccggatccacaacagggggattattgatgggatcgggtgtatccgctggcgttacgccgtcccatttactggtcagataccagtttttctcgtcattccccttccctttagccagcgtgtagacgtaagccccagcttcgacagttccggtggtcagcgcgaagttacctgcagaattaccgccaacctcaatgagttcaataccgttgaccgtttgtgcaccgacgccgccaatgttatcaacccgaacgcgagtgttcccttgggtatcgcctttcacgttcatcttatcggtggggctattatcgccgcccagcgtcgcgttgaacgtcatcaggccattgtttccggtatagttgccgttaacggtcagtacattccccggtttccccccttcgctattcatttgaaccgtgccgccattctccaggttgccgccgatagtggttttagcgacacgcagtgccccccccaggcataacgttcatatcacctgcagtggtgacatttccgctcatcacaccgctgttatggatattaatgtgttgacttgccatattaatggcagagtcggaaccgaaagcaatttccccccccacgatatccgtcgtaccctgatatgccgcggaatcgttgttaagagtcaggatcccggtacccagttttgtcacatcaccgctaccgctgatactgtgcgtcatcgcccagctacgctcagtggagatggtgagcaggccattattgataacggaagcatcacccaggtttttctgctcgttgacgctgagcgcgctgcctgtatcaatgttgaattgccccacaaagcggctattatcgccatccaactctacatctgtcctggcggttgcgctcacgatacccttcccgcttatgctattacgcagttcgccagtcacgttttttagcgttaacagaccgtcattggcaatatttcctctgcctaacccctgagtattatcgaggctgacttccgcatttgggctaatgctggttaacgcattgtagcgtgcattaagcccctcgatagccagcgttccccctgtaacattcaggtttccgccacctgtcagttcaccctgactgatcccacctttatttaccgtcagcgccccctctttgaacaaaacagtgctacccatctgcccggtgaatgtctctaccgtctgcgtgcttccattaagatcgacgatggccgcgttgctgatgttcagttcccgggtgttgccaagtgcaccatccgcatcggtacgtaatgtccccatctgaacgtaggttgccccctgatagtcgttctgaccgttggaaaggctaacctgtcgcaccgtattgattgccagatccccttcaccaccgatttttgcgctcatatcggccgttgcgccataggctccgccatgttcggctaacgtcagcttttgcccaccatggatgttcagcgctttcagcccatagttaacgtacaaaccattacctggtgcggtcgtgaggcggaatccataatcaccctcggcgaccaccgttccgttttgcgcaatgtgtaacgttttgtccgcttccacctcgtcgccctgtaaatcacgtaacgttaaactgccaccgctcccaataaccgtttgcgccttcaccagttgaacgccgacatggctatcgtcgtgttccagcaaattgagcgtcgtcagagggttattcgccatgggatcattccacggtttaggcacgtcgataagcacgtcgcccgtcccgtttacctgatagttacggcctttccaggtgtagtcacccgcgccgacaaccagcgtatcgacgctgatatatccctccgcgagcgtcgcagcaggaatatccgtatcgaaaatgatggtacctccattcatggccagtccaccaatggattgctctccaacttttacgcttgtggtattttcactgtcagactgcaacatcgcgtgagtaagcgcagcggtgttgtcgcgttccagagtgaaggtactgtctttcagttgggcaacaccggcgaattcagtccctgttgcatgggtaaagccaaacatcttgtcggaggaactcagctgcactcgcatcaagccatcgcctttgagcgcattggtcagcgtgtaatctcctgcactgttcgtacttgcgagaatgtcgagcgtaccggggtttgcaatggttacttcactgctccccatgcccgttaccccatctgccgtatgagacgcaatggtcaggaggccgtcattgaccagcgttttaccgctataagtattccctgcattgaacaccgtatggcctgcatcatggatcacttttccgtctttatcgtcacctgtaatcagcatatcgacctggtagccggcatcactgttattggtatgattaaagacaaaaacgccttcgccaagaccaaactccactttcgtcgcattggtgataaatccggcatctgccgccgcctcaccgtgagcagcaccaatgtttagcgttcctacagcaggctcaaaaacacctaagtaaacttctccaccttcgacattcagcgtaccgttattcgtcagggttaacgtacccgtaccagatgtccctacgtacatattgaatgtttcaagaagagagttctgcccatccaccctcacgtcgcccttacttttgtcattgagagctatctgtgtatcacgcgctttaactatacctccggtggtaatattcagttcacccgtgcctaatacaccgacctgtagcaattgtgcgttagtagaacttgtctttaaattccagagactgtccgtactaatattaactatccccttaccggaggcatttcctccgataaatccatagcccgtactattaagggtggcaccattactgacatttacgataccgctaccaaaattaccgacattgatacccacagtatcgaagctacttgtcgcatccatcaggttcagtgtgccgataccgcttgctttatcgcccaaaaaagtaatattttggcttacgaacttaccgccatcgctaatattgaggtttccgacgcccgcaacaccaatggtggtatagacattcttattgacctcccacattccccccgtggtgatgctgacattcccgacgccggtttctccataaccgagactacttcctccgttgctgacaacaagcccctgattactgatattcatttcgccgtggccgtcataaccaagattagttccgagattagtgataacggagttcttatccttaacagtaatgttgcctgtgcctgtttctttcatccccgcagtgataattccgctatctactttgccttcactgctgacattaagttcaccgtcgccagcatcaccgatatagatatagcggaaagcttcgcccgttccgaggaaattccaatgccctttatcggtcacgttgacgacaccgtgggaaccgtcctgaacgcccaccaaactatattctttgttattaatcagtccattattggaaatattgactgtgccattaccgaaatatccattatagagtctgcgtaccgtgatgacagagtcttgatcctgcacattcagggttccgataccggtggcattgccaccgataatcgtattttcagccgtaaccaaccccccctcgcgaatagtcgcctccccagttccttgattaccaatttgaaattcaatactggaatcattattttttattagccactcgccacccttttcaacgacaacctggccattactgcccgcctgatagcctaaaatggcgacgatactactcgtgacgtaacccttatccgtaatatttaaactacctgtgccatagctacctatttcgaataattcggtcgtcagaacagagtcctctccctcaacattgaccgtcccgacgcctcctgtgctagaacctaatcttaaatagcctccatcgacgtgacccttctgtttaatattcagcgtccccgttccggattgacccacatttaaaggccttgcattatttccgctatcatacaatcgccaggtgccacccaaaacattaacggtgccctcactgtcctcattagcgccaatgacgctggtagtaatagtggttaaggaggcattaccgccagccaaaatattaagcactccagtgccataccagccaaccaggtaggcatcataagcaacatcagtatcaatattggtaatctgatcattatcaacttccagacttgcaccagacgcactaccgcttagtgccagcaaaacacccagcgtcaatctactgaatttcgttgtcagtccagaggatttacgcaaattaaccgtgcttgttttacctgccctgcgagttaattcgctgcaggcctgaaatacctgtagagtgcaattccatatcacgcgatagattctattcatataaacgctccatatacaaacaatacagccacgaaagagatgagtcgtcagacattaaaaatgaaacttattaaattgtcagaggtctgtattgagtgttagttggaggtgggaaggtgtcaatttggctaatttgctaatgctttcgaattgatagattaaaaattgcatagttcttattttatttaaatatgaactatgagttattgttgcttaataagaaaactgtttctttcaataggaaaattatcatcatcatatttaacaaagaatagcactaattgctaaaaatcgaagtttattaaaccccttttgcatccattagtgtctttaggaatattcgctataaaataagggttgtgcttaatgctttaagaaaaatagcaattttcccttgaatatcgtactggtgatggaacgatgaatctgcaagctggcttttaacaagccagctctaaaagaagggaaataagaataactatactcaaaaactaacagccacggtcatcatgatgtggctgtcaatgaaattataacccaggcgctttccataagctcgtcgtcagtccatgatcaaccagccccagctgatcctgataaactgcctgccacttatcgcgactatcctgataaagttcatgcttttccgggtctggtgtgtgcgtccgttcccagcgaaccaggcgttctccggtttctgccatactactaaaaattccggcaccgacgccagctgcaatggcacatcctaatgcagtggcttctttgaccaccggaatattgacgggtaatccgctgacatcagcgagaatttgactccataatttccctttactacctccgcctgcaaagactaagctactaggatgaatattgctgaaatcagcaatttgctgcaagttacacgcacttacaatcgccgcattttcttccagcgcacggaacaatgtcgctttgttacatttatccgggtcaatggacaagttaataaaggaaggcgcagcgtgataccaggttttaaagcgcattctgtcggagaagatcggcattacgccccagctcccaggcggcacccgactggccatctcttccagcagcgtataggtgtcgatgcctaaacgttcggcaatcagtttttcttcggcacagaaagcatcgcggaaccagcgcatggtgagtccggtaaaaaagcttatagattcagcttgtaccatgccaggaataacatgaggattaacgcgcacgttcatttctgggtctgtcaccggcgcggctaaatttacaacttgctgccagaatgtgccgccaagaaccgcggtttgtgccggacgcacaacgcctaacccaaggcaaccaagctgcacgtcgcctcctccaacgaccaccggagtgcccgccttcagaccgcagagttccgccgcttgactacttaccacgcccagcaatgtgccggtttctttgacaggagaaagaatatcggcacgtaggccagccatatccagcaatgcaggtttccagtcacgggtggttagatcaagaagtcccgtggtgccagcgttagagggatccaccgccagttcgccgctgagcatataggccagccagtcgctgatcatggtgatggtacttgcctgacggtaaatatcggaacgatggtgcgccagccaaagtaatctggggatggcacttaaagccagtgtttgtccggtcgcgcgataaacttcgttttcaaaggtattgttgtgcagttctttaagttcgctaacttcgcgtgccgctctggcatccacattggcgcaggcccagatcggggctccttcattattatataaaacaatgccttcacgcatgctacatgcgctaacggcagcgatatactccggggctatgccggcgttgtgcagcgcctggcgcatacactcacacgccagttgccagtttttgttgagatcaaattccatagaaccaggaacgtccggtactgccagatgccgccactccgcctgtcccactgctatttgattgccttccaggtcgaatatcacagcccgaatacttccggtgcctgcatccagcgccatcaggtagtacttactttcactaagggtaaagagtcgagccattagattatcctcggcttatgcgttctgtctgttcctctatacgttctccatcattcccggtaataaggtcatgcaaatttaactacgtaaaatcgccgctgctgtgtcctgatcggtaaccagtgcgttgatataaccgcctttcattgcagcggcaattgcttcggctttattttctccccctgccacgccaacccggacgggtatggtcttcagcgcgcttaaaggtaagccaatcagttcgttatgtattttgatattcgtgacaacgtcaccttttgcatcaaaaaagtagcctaaaatgtcgccaaccgccccttttcggccaatcattaactgttcgccctggctgatataaccggagcgaatgattgtcgcatcgtcctgttgactcacagcaccaatgccgacaatcgccacatccgctgcttgcgcggctaacagaacatctttgacgcaattttcattttttagcgtacgggcaatgtcagcggaggatgcccgcaacggagccggaataatattcacactgcacgccgcgttaagctgcccgattcccgtcatataagaaccgacgccaccggagagcgtgaccaggcgaatttgctgactgctaataaaaccacttaagcgttgcagcgtattcatggttgcctcgccaaaaccaatcgccagcatctgttgtggttgaagtaaactcatcaacatatgcgccgcgcctatccccagtcgcccaccgacatcagcatccgcaagcccagggatcacccggacatgttgcaggctaaactgacgacgtaattgagtttcatattccagacagccttcaaagcgagaattaatctgtacgcgaataatgccggactgatgccctttctccagcaatcggctcactttcaaacgtgtcaggccgagacgatcgctgatctcgctctgggtcagcccgtcgtgatagtaaaaccacgcgatccgcgcgacctgttcttcttcacacattccctgttcactaattgcgctatcgttgattgtcataattcattcttcactttgaacatatttaaatctttaatgcaattgttcagttcttgctcatttatatctgtgatggcaaccacagtttgactctacgagcatgaacaaacgcaaccgtgaaaatcaaaatagcataaattgtgatctattcgtcggaaatatgtgcaatgtccacctaaggttatgaacaaattaaaagcagaaatacatttgttcaaaactcacctgcaaaactgaacgggggaaatatgcaaacgagtgatacccgcgcgttaccgctactttgcgcccgcagcgtttataaacagtatagtggggtcaatgtcctgaaaggcatcgattttacgttgcatcagggggaggtccacgccctgctcggcggcaatggtgccggtaaaagcacgttaatgaagattattgccggtattacccctgctgatagcggtacgctggagattgagggcaacaactacgtcagattaacgccagttcatgctcatcagctgggtatttatctcgttccccaggaaccgctgcttttcccaagcctgagcataaaagaaaacatcctgtttgggctggcaaaaaaacagctctccatgcagaaaatgaagaacttgctggcggcgctgggctgccagtttgatctgcatagtctggcaggaagcctggatgtcgccgatcgccaaatggtggaaatcctccgcgggctgatgcgcgacagccggattctgatcctcgatgaacctaccgccagccttacccctgcggaaaccgaacgcttgtttagtcgcttgcaagagctgcttgctactggcgtgggtattgtttttatcagccataagctgccggaaattcgccagattgccgatcgaattagcgtgatgcgcgacggaaccatcgccttaagcggcaaaaccagcgaactgtctaccgacgacattattcaggccatcaccccagcggtacgggaaaaaagcctctctgccagccaaaaattatggctggagttacctggtaaccgcccacaacatgccgccggaacgccggtgctgacactggaaaatctgaccggcgaaggtttcaggaatgtcagcctgacgctcaatgccggagaaattctgggcctggctgggctggtgggggccggacgcacagaactggccgagacgctctatggtctgcgtactttgcgtggcggacgcattatgctgaatggtaaagagatcaataaattatccactggagaacgtttactgcgcggtctggtttatctgccggaagatcgccagagttccggactgaatctcgatgctagcctggcctggaacgtctgcgcccttactcataaccttcgtggattctgggcgaaaaccgcgaaagataatgccaccctggaacgttatcgtcgggcgctgaatattaaattcaaccaaccggaacaagctgcacggacattatccggtggcaaccagcaaaaaatcctcattgccaaatgcttggaagctagcccgcaagtattgattgtcgatgagccgacgcgcggcgtggatgtcagcgcccgtaatgatatctaccagctgttgcgcagcatcgccgcacaaaatgtggctgtgctgcttatctcctccgacctggaagagatcgaactgatggcagatcgtgtgtatgtgatgcatcagggcgaaattacccactctgcactgaccgagcgcgatattaatgtcgagactattatgcgcgttgccttcggcgatagtcagcgtcaggaggcgagttgctgagctaaagtcagcgtcaggaggcgtcatgctgaagtttattcagaacaaccgtgaaatcacggcactgctggcggtggtgctgctgtttgtattacccggttttctcgaccgccagtatttaagtgtgcaaacgctgaccatggtttatagcagcgcgcaaatcctgatcctgctggcaatgggcgcgacgctggtaatgcttacgcgcaatattgatgttagtgtgggtagcattaccggaatgtgcgcggtgctgttggggatgttactgaacgcaggatatagtctacctgttgcttgtgtcgcgactttactgcttggtttgctcgcgggatttttcaacggtgtcctggtcgcgtggctaaagatccctgccattgttgccacccttggcacgttagggttgtacagaggcatcatgttgctgtggactggcggcaaatggattgaagggttacccgccgaactgaaacagctctccgccccgctgctgcttggcgttagtgcaattggttggttgacgataattctggtggcatttatggcctggctgctggcaaagacggcgtttggacgcagtttttatgccacgggcgataatttacagggcgctcgtcaactgggcgttcgtactgaagccattcgcattgtggcatttagcttgaacggctgcatggcggcactggcgggaattgtgtttgctagccagattggttttatccccaaccagaccggtaccgggctggagatgaaagcaattgcagcctgcgtgctgggcggcattagtttgctcggtggttccggtgcgatcattggtgcggtactcggcgcatggttcctgacgcagatcgatagcgtactggtgctgttgcgcattccggcatggtggaatgattttatcgcgggtctggttctgctggcggtgctggtgtttgatggacgcctgcgttgtgcgctggaacgtaatctacggcggcaaaaatatgcccgctttatgacgccaccgccatccgttaaacccgctagcagtggtaaaaaacgggaggccgcataatgcgtattcgctacggttgggaactggctcttgccgcactgctcgttattgagattgtcgcatttggtgcaattaacccgcgaatgttagatctcaatatgttgctgttcagcaccagtgactttatctgcattggcattgtcgccctaccgctaacgatggtgattgtcagtggcgggatcgatattagctttggtagcaccatcggcctctgcgccattgcattgggcgtactgtttcaaagtggtgtgccgatgccgctggcgatactcctgaccttactgctcggcgcattgtgcgggctgatcaacgccggattaattatctataccaaagttaacccgctggtgattacgcttggcacgctgtatctgtttgccggaagcgctctgctgctttccggtatggccggagcgacggggtacgaaggtattggtggattcccgatggcgtttacagatttcgctaacctggatgtgctgggactccccgttccgctgattatcttcctgatatgtctcctcgttttctggctctggctgcataaaacccatgccggacgtaatgtgtttttgattgggcaaagcccgcgcgtggcgctttatagcgcgattccagttaaccgtaccttatgtgcgctctatgccatgacggggctggcgtctgcggtcgccgctgtgctgctggtaagctattttggtagtgcacgttccgatctcggtgcgagctttctgatgcccgccatcaccgccgtggtgcttggcggggccaatatttatggtggttccggttccattatcggcaccgccattgcggttttattagtgggatatttgcaacaaggtttgcaaatggcaggagtgccaaatcaggtgtccagcgccctttccggtgcgctacttatcgtcgttgtcgtaggtcgttccgttagcctgcatcgccagcaaattaaagagtggctggcgcgtcgggccaataacccattgccataaaggatatcttcatgacacttcatcgctttaagaaaatcgccttacttagcgctcttggcattgccgcaatctctatgaatgtgcaggccgcagagcgtattgcatttattcccaaactggttggcgtgggattttttaccagcggtggcaacggcgcacaacaagcgggtaaagagctgggcgttgatgtgacctacgacgggccgacagaacccagtgtttctggtcaggtacagttgattaataacttcgtcaatcaaggttataacgccattatcgtttctgcggttagccctgatggcttgtgtccggcactgaaacgcgccatgcaacgtggtgtgagagtgctgacctgggactctgatactaaaccggagtgccgctcttactacattaatcagggaacgcccgcccagttaggaggtatgttggtggatatggcggcgcgtcaggtgaataaagacaaagccaaagtcgcgtttttctacagtagccccaccgttacggaccaaaaccagtgggtgaaagaagcgaaagcgaaaatcgccaaagagcatccaggctgggaaattgtcactacgcagtttggctataacgatgccactaaaagcttacaaaccgcagaaggaatattaaaagcgtatagcgatctcgacgccattatcgcccccgatgccaacgccctgcccgctgccgcacaagccgcagaaaacttgaaaaatgacaaagtagcgattgtcggattcagtacgccaaatgtgatgcgcccgtatgtagagcgcggcacggtgaaagaatttggcctgtgggatgtggttcagcaaggcaaaattagtgtgtatgtcgcggatgcattattgaaaaaaggaagtatgaaaacgggcgacaagctggatatcaagggcgtaggtcaggttgaagtcagcccaaacagcgttcagggctatgactacgaagcggatggtaatggcatcgtactgttaccggagcgcgtgatattcaacaaagagaatatcggcaaatacgatttctgatgtgcattacttaaccggagtaagttatggcagatttagacgatattaaagatggtaaagattttcgtaccgatcaaccgcaaaaaaatatcccttttaccctgaaaggttgcggtgcgctggattggggaatgcagagtcgcttaagccggatatttaatccgaaaacgggtaaaaccgtgatgctggcttttgaccatggttattttcagggaccgactaccggacttgaacgcattgatataaatatcgccccgctgtttgaacatgccgatgtattaatgtgtacgcgcggcattttgcgcagcgtagttccccctgcgaccaataggccggtggtactgcgggcgagtggtgcgaactctattctggcggaattaagtaatgaagccgtggcgttaagcatggatgacgccgtgcgcctgaacagttgcgcggtggcggcgcaggtttatatcggcagcgaatatgaacatcagagcatcaaaaatattattcagctggttgatgccggaatgaaagtgggaatgccgaccatggccgtgactggcgtgggcaaagatatggtgcgcgatcagcgttatttcagcctcgcgactcgaatcgccgctgaaatgggggcgcaaattatcaaaacctattatgtcgaaaaaggttttgaacggattgttgccggatgtccggtacccattgttattgctggcggtaaaaaattaccggagcgcgaggcgctggaaatgtgctggcaggctatcgatcagggcgcttctggtgtggatatggggcgtaatattttccagtctgaccatccggtggcgatgatgaaagccgtacaggcggtggttcaccataacgaaacggctgatcgggcatatgaactctatctgagtgaaaaacagtaactgcggatctaaggagaagaattatgcacgtcacactggttgaaattaacgttcatgaagacaaggttgacgagtttatcgaagtttttcgccagaaccacctgggctctgtacaggaagaaggcaatttgcgcttcgatgtcttacaggacccggaagtgaatagccgcttttatatctacgaagcctataaagatgaagacgcagtggcgttccataaaaccacgccccactacaaaacctgtgtcgcgaaactggaatctttaatgaccgggccgcgtaaaaaacgtctgttcaatggtttgatgccgtgaggcgaatttatcaattttatctacaattggggtaacgcgctgacgggagtaaaaaaatgtctgactggaacccctctttatatctacacttttccgctgaacgaagccgtccggcggtggagctgcttgccagagtgccgctggaaaatgtcgaatatgttgccgatcttggctgtggcccaggtaacagcaccgcccttctacaacaacgttggcctgcggccaggataacaggcatcgacagctctccggcgatgattgctgaagcgcgcagtgctttgccagactgccagttcgtggaagcagacatccgcaactggcaaccggtacaggcactcgatctgatttttgctaatgccagtctgcaatggctgcccgaccactacgaattgtttcctcatctggtttctttacttaatccgcagggcgtgctggcagtacagatgccagataactggctggagccgacccatgtgctcatgcgcgaagttgcctgggaacaaaactacccggatcgcgggcgtgagccgttggctggcgttcatgcttactacgatattttgagcgaagccggatgtgaggtcgatatctggcgaaccacctactatcaccagatgccgagtcaccaggcgattatcgattgggtgactgccactggattacgtccgtggttacaggatctgaccgagagcgaacagcagctttttcttaagcgctaccatcagatgctggaagagcagtatccactgcaagagaacggacagatactgctggcatttccgcgtctgtttattgttgcccggcgtatggagtaaatatcacgtcagctggtaatgacgatcgggaagaatttttgctggaatttcggcttcatcgttcatctgtaacaggtcaatttcaatagcgttgcagatggcatccagtggtaaatcattgttttcagtaccgaacggatcttccagttcttccgccagacaatccaggctaataaaagtgtaggaaatcagcacagagataaaaggcgtcatgtaatgcaggtccacgaccagcgcgaacggcagcatgatacaaaacagataaacggtacgatgcaaaatcagggtgtaggcaaagggaattggcgtataggcaatgcgctcgcatcctgccaggaccgcactaatatcattaagccgatcgttgaggctaataaacaggatatcactaagctgtccattgcggcgctgaaccgccaaccattctcccattattaacaagatacggttagctggagagttgctagccagtacacgctgaagatcttcagtcttgagataatgagccagcacttccgcctgtggctgtttgcgtaatgtcatgcgtaaacagtgggcgaaagcgatttgcagccgggcaaactcccttacacttgcgctatccggcaatgtcgtttttacctcgcgcagtaagctccgactggcaatcatcaactgcccccaaagttttcgcgcttcaacgtaacgggcgtacccggcattattacgaaaaccaagaaaaatggcgatggcgacaccgagaatgctgaacggtgcgagggtgaatttgatgcccagatgcgtgtaccagggcagcatgaaaataacagcgatagaaaagagaaaattgagtagtaagcggctggatatcttggataatacactgccgtgccagacaaaaatacggcgcagccagtgttgttgtggacgaacaatcatggttatcttcaggcgtggaaaagtcgccctattaaacgtgattacgatcacattctcaagacgctacttacaaattacctacaagcttacaacattagcaggcgctgcatgtggcacctgttaatgataaaggcatataggatgttgtaactaatatggtgaaataagaaacccggtcgaaaccgggttcagaagtaacggtgttattagcacaacggacgtacagcttcgcgcatccctttttcgagaatcgcatccaggtcattagcaacctgctcgaccagaccaggcacttgcgtcaggtcctgctcccagtggtctttttctgccaaaacaatcgctaccagttcctgggtgccgataacacggtcacgatgctggctccagagttgctgataacgttccagccagtgtgcatcgtcctgtaccggatatgtttcgccgttacgctcaccacgatagaacgcaatcaatgccgctaatgcgaaagtaaggcgcgccggaagtgtgccgtttgccttctgccctgccagcagctgtggcaggatgcgggtgcggaacttggtcataccgttgagcgcgatagacagcagctgatgcttaatgtacgggttacggaaacgcccggtgactgcactggcgaaagattccagttcatcacgaggcaaatccagtaccggaataatttcttcgtagatagctttttcaacgaatgcgcaaatttcagcatcgttcatcgcttcacctacggtatccagccctgcctggaacgccaccggcaccagcgcggtgtgcgcaccgttgaggattgccactttgcgttctttgtacggtttaatatcgtcaacaatcagcacgttgagcggatatttgtccagacgcagttcagtcgctaaggatttcggtccctgaatcacaaacaggtaaaagtgttcagcggtgtcgagaaaaccatcgtgataacccagttcttcttccagtttagccacttcatcgcgcggataaccggtaacgatacggtccaccagcgtagaacagaagctgttagcctgatccagccattgaataaatgcttctggcagtgcccactcttgcgcatagcgcagcaccagttcacgcaacgcgtcgccattgtagtcaatcaactcacacggaatgatgatccaacctttatccagcgcaccgttgaaatggctaaagcgttcgaacagcagacgggtcagttttgccggatagcttaccgctggcgcgtcatcgaatttatcgcccgcatggtagctgatacccgcttcggtggtgttagagaaaacaaagcgcatttccgggttgtgcgccagtttcaggaattcatcgtattcactgtagacgctgatttcacgattaacgctgcgaatcagacgcgcgtcgctgaccgcttcccccttctcattcaggccacggataatggtggtgtacagaccatcctgcgtgctcagactcggcgggaaactagtttcaatcggacgaacaacgaccacgccagaattcagatcggtgtgctcattcaggagatcgatttgccagtcaacaaaggcgcgcaggaagttaccttcaccaaactgaatgatacgttctggatactgtgcaccgggaaaatcgcgacgatttagtgttttcacaatgggttcccttctgattagtcatacaacctgtttgaattggtacgacaggttagcaaactttaatacgccgaacccctgttttgatcaactcctgatgattaatgagcagttttatgagaaaagtgtggcgcggatcatggtttaatcgaggaaaaacgccttttcctggatcataaagtggtagaacacattgcattcaaatcgcgcgtaatgaataaagatgtcagacaacttcctcaccgtaacgcatagtgctggtacggttgcgcccatctttcttgctgcgatacagacacgtatcggcttcgaccatcaatttattaaagtcatcggtcagcgttaggtagcttgcgcgaccactaccgacgccaatacttaccgtgagataaagcgttttttgttgccaggtgaatggttgcagttcaacgcctttacggattttttccgccattagcagaccatcgacaggattcacgctcggcactgcaacagcaaattcttcgccgcccattcgcgccaccagccccttatcaccgacaatcttctgaatatgccgggcaaacacgcttaacactttatcgccacattcatgtccatagttatcgttaatgcttttgaaatagtcgatatcaagcagcatgacagtcagatgttgtgtctgtttcaggcttggacttttcagcgcctcataaagaccggaccgactgtaaacctgagtcagaaaatcaaagtcggctcgcagcgcaacttgcttcattaggctattgatcgctgccacgctaaaagaaaccataattgggcatatcgccatcgtggcaataccgagacgtgcggagaacatttgcggaatggagaacgggctaccgacgctgatatcaatcacgctatttgccaccagtacgatttccaccgcaccggtgacaaaggtcaacagacatgttacctgcggcgtatagcgcactgcacaccagattaatgcaggcagcgggaacgccagactccccgctccgccaatgactacgctggcaataacgctcacaataagcgcgatggcgggcatcatctgttctgctttaaagcgcggcagcactccaggaatagccaacgtcagcatacaaggcacgatcaacacgcccgtactgaattgctcactgaaccagtccgcaagcaaaggccagaaatccagactatcaatactgaccgaaccaagatagcatgttcgctgacagcggcggcaaataaaggtaccctgggaatgctattttgtcgttttccgcaattctcatggctgattcatctgtacaaccagccagtgatagattaccgccacgatataacgttgttgttcttcgcttaagctaacaccctgcggaatgttatgccacttagccagacaaccgcgacagcaggtcgcggtggcgtgctgagcgataaacaccggatgcccgcgcatgggggtttgcttaccgtcattagccggtaatgccggagcaagacgtttagcgacaaaatccgccgcatgttgttcgatgactggcgcgcctttctccaggcaatactgacgctctttcatgcccagacgaaagcgagagcgaaatttactacgggataaacgcgcgaagagtggatcgagagactgcattaataaacgctacgccctaactgtttcgtcaattgttcaagaacggcaatacccgcaaggctgttacctgcatcatccagttccggactccagacagcgatggccatttcatgcggaacaatcgccacaataccgccaccaacgccagatttcgccggtagccccacccgccaggcaaactcccccgcgttctggtacataccactggtcgccatcagcgcgttaatttgccgcgcctgcattggcgtcaccactggttcatcaatatgaatagctttcccctgattagccagaaagacaaacgtccgggccagctctacacagctcattttcagagcgcagtaatgaaagtagttttgcagaacggttgtcacgtcatgatggaaattgccaaagctcttcatcagccaggcgatagccgcatttcgcgcggaatgttcaaattcggaacgcgctaccaccgtatcgtaggaaatatcagacacaccgcttaagccgcgcacgacttccagcatacgttgccgtggtgcgcttaatcgcccttgcaacatatcgcagaccaccagcgcaccggcattaatgaacggattacgcggtataccctgctccatttccagttgcactaaggaattgaacggacttccagacggatctttgccgacgcgttgccagatttcctcttcggagtaatgacgcatggcgacaacgagactcagcactttggaaatagactgaatggaaaaacgttcttgcgcgtctccggcctgaaaaagctgtccgtcaacggtacagatagcaatccccaatcgggaaccgtctactgtagccagcgccggaatataatccgcgactttaccctgaccaatgagcggccgcacttgccgcaagatgttttctaaaattgcattatccatggcgactgccactttctactcctggaccgcaggtctgaaaagacctgcgagtatatcagagctgaatatgtcgcgtcagatccggtctttccacaccgtctggatattacagaattcgtgtaagccgaaatgggaaagctcacgaccaaagccactctttttcacgccaccaaaggccactcgcgcgtcgctggcacaataaccattgataaacaccccaccgcattccagacgtgccgccatctgtctggcctgtgtttcgtcagtggtaaaaatggtcgcactaaggccgaactcactatcattagccagttccagtgcatgttctgcatctttcgcaatggtgattgccgcaacggggccaaacatttcttcccgaaacgcggtcatttctggggtaacattcgccagaaccgttggcggatagtagttacctgccccagccatcttttccccgcccagtaacaaacgcgcaccctgcgccagggttttctccacctgatgatgcagctcatcacgtaaatcaaaacgagccattggtccgagagcgttctcttcgtcacggggatcgcccattttcaaggctgccgcagctgccacaaaacgttcggtaaatgcgctagcaattccctcttcgataataaagcgttttgccgctgcacatacctgtccggtattctgataacgtccggctaccgccgctttcaccgccagttccagatcggcatcgttaagcacaataaacggatcgctaccgcccagttccagtacgcattttttcagtgccgctccagcctgtgcgccaatagccgctcccgcacgaacacttccggtcaccgtgacagcagcaatgcggctgtctttaatcatctgactgacaccgtcgttgtcggcattcagccagccatatacgccttgtgggatacccgcatctttaaacacctgggcaatgagctgtgcacagcccatcacattcggcgtatgtttaagtaagtagccgttacctgcaagaatgatgggaacagcgccacgcatcacctgccataacggaaaattccacggcataatcgccagaatcgtccccaacggtcgatactcaataaccgcctgctgattttccaccagcgtaggttccgccttcagcattgccggaccatgttctgcataccagtcacacaaattcgcgcttttcgccacttcagcgcgcgcctggttgattggtttgcccatttcgcgggtgatcatttgcgccatttcttcgctacgagcgcgcagagccttaccgatatcacgcagtttttcagcacgataatctatatttgtctcgcgccagtcgcgaaagcctgctgccgccagctgaagtgcgttttcgatatcgtcagcgccagcccacggcagcacagaaagttgttcacccgtggcaggatttatgctaattgcatgagttgccggagtaatggtcatcggggtatctcctttatgagtcatggtatgaagatacgcagatttactcttgctttaaaatgaataatattaagccacttattcacgaatcgagaatgctatggatctgacccaactggagatgttcaacgcggttgccgaagctggcagcataacccaggctgcagcaaaagtgcatcgcgtgccgagcaatctcactacccgtctgcgccagctggaaacagaactgggggttgatctgtttattcgcgagaatcagcgtttacgtctctctcctgccgggcataactttttacgctatagccaacaaattctcgcgttagtggatgaagcgcggagcgttgtcgctggcgatgagccgcaaggtttattttctcttggtagcctggaaagcaccgctgcagtgcgcattccagccacgctggcggaattcaaccgtcgttatcccaaaattcagtttagtctttccaccggcccttccggcactatgctggatggtgtactggagggaaaactgaatgcggcgtttattgatggacccattaaccatactgccatcgacgggataccggtataccgcgaggaactgatgatcgtcacgccacaaggatatgcgccagtaacccgtgccagtcaggttaatggcagtaacatttatgccttccgcgccaattgtagctatcgtcgccacttcgagagctggtttcatgctgacggtgccgctccgggaactatccatgagatggagtcttatcacggaatgttggcctgtgtgatcgcaggagcaggcattgcgcttattccgcgctctatgctggaaagtatgccggggcatcaccaggttgaagcgtggccgttagctgagcaatggcgttggttaacaacctggctggtctggcgtcgtggtgcgaaaacacgtccgctcgaggcatttattcaactgctggatgtgcctgacagcgcaagacagggatatcaatgagctatttttgatagttcttgcggttaatatgctctatatagtgatgttccgatgacttatgactatatggggcaaatatggttacgccagtaagcatcagcaattacatatctcttcctgatgattttcccgtacgtaatattgcaccgcaggtaaaagaagttttaaaggattttattgatgcacttagtacaataatatgtaatgaagagtggcgcacgtctttaaacatcaacagtgccacaaaaaagatatttaataaccttgacaacttaagttatattcagaggacttcttttcggggtaacgacacgctatacaatgaaaaggttcagtttaaactcacttatcccgccaggaatggaagacacaaagaaaatattgaatttcaggtagtaataaatttaagccctatttatttagataattttcgccatgatggagaaattaatattttttgcgctcccaacccaaagcctgtcactatggggcgcgtatttcagaccggcgtcgagcgtgtactctttctgtttctgaatgattttattgaacaatttccaatgatcaaccctggtgttcccatcaaaagagcgcatacaccacatattgaacccctgcctagcgatcaccataccgctgcagattacttacgccagtttgatttgcttgtcctgaattttatctctcgcggtaattttgtcatactcccccgattatggagtaactctgaggttcacagatggttcgtcaataaagatcctaacttgatcaccgccattctcgacataacggacagcgaattaaaagaggatttgttgcaaagcctgatggatagtttaggttctaacaaacatgtactacccgaagtctgcatctgctttttatcccttttagcagaacaagaatctcctcattttcagaacttgtttttatttttcgccaatatgttattgcactatcaccaatttatgaatcccaatgaaagtgatttgaatgacgtgttgatgccagcaagtttaagtgatgataaaattatcaaacatatggcgcgcaggaccctcaaactgtttgtaaaaaatgaaacaccgccaaaagttactcacgaagacctggtgaaaaacaggcctcgctcccctgtcagaccacctatacccgcaaccgccaaaacgccagacctccctgaacgtcattaaaccgtgatgttaccgactctctgacgcgtgaaagaatcagcgtcagagaaacggaaaacgcgatccagatcacaaatgcattgtattcacatcattaaccgttttaagatcatttcatcactttttcgcaactcacccgataatctgttatgacaacaaacactgtttcccgcaaagtggcgtggctacgggtcgttacgctggcagtcgccgccttcatcttcaacaccaccgaatttgtccctgttggcctgctctctgacattgcgcaaagttttcacatgcaaaccgctcaggtcggcatcatgttgaccatttacgcatgggtagtagcgctaatgagtttgccttttatgttaatgaccagtcaggttgaacggcgcaaattactgatctgcctgtttgtggtgtttattgccagccacgtactgagctttttgagctggagctttaccgttctggtgatcagtcgcattggtgtggcttttgcacatgcgattttctggagcattacggcgtctctggcgatccgtatggctccggccgggaagcgagcacaggcattgagtttaattgccaccggtacagcactggcgatggtcttaggtttacctctcgggcgcattgtgggccagtatttcggttggcgaatgaccttcttcgcgattggtattggggcgcttatcacccttttgtgcctgattaagttacttcccttactgcccagtgagcattccggtagtctgaaaagcctcccgctattgttccgccgcccggcattgatgagcatttatttgttaactgtggtggttgtcaccgcccattacacggcatacagctatatcgagccttttgtacaaaacattgcgggattcagcgccaactttgccacggcattactgttattactcggtggtgcgggcattattggcagcgtgattttcggtaaactgggtaatcagtatgcgtctgcgttggtgagtacggcgattgcgctgttgctggtgtgcctggcattgctgttacctgcggcgaacagtgaaatacacctcggggtgctgagtattttctgggggatcgcgatgatgatcatcgggcttggtatgcaggttaaagtgctggcgctggcaccagatgctaccgacgtcgcgatggcgctattctccggcatatttaatattggaatcggggcgggtgcgttggtaggtaatcaggtgagtttgcactggagtatgagcatgattggttatgtgggcgcggtgcctgcttttgccgcgttaatttggagtatcattatatttcgccgctggccagtgacactcgaagaacagacgcaataattgaaaggcccattcgggccttttttaatggtacgttttaatgatttccaggatgccgttaataataaactgcacacccatacataccagcaggaatcccatcagacgggagatcgcttcaatgccacccttgcccaccagccgcataattgcgccggagctgcgtaggcttccccacaaaataaccgccaccaggaaaaagatcagcggcggcgcaaccatcagtacccaatcagcgaaggtactactctgacgcactgtggacgcgctgctaataatcatcgctatggttcccggaccggcagtacttggcattgccagcggcacaaaggcaatattggcactgggttcatcttccagctcttcgctcttgcttttcgcctccggactatcaatcgctttctgttgcggaaagagcatccgaaaaccgataaacgcgacgattaagccgcctgcaattcgcagaccgggaatgctaatgccaaatgtatccatcaccagttgcccggcgtaatacgccaccatcatgatggcaaatacgtacacgctggccatcaagctctgacgattacgttcggcactgttcatgttgcctgccaggccaagaaataacgcgacagttgttaatgggttagctaacggcagcaacaccaccagccccaggccaattgctttaaacaaatctaacattggtggttgttatcctgtgtatctgggttatcagcgaaaagtataaggggtaaacaaggataaagtgtcactctttagctagccttgcatcgcattgaacaaaacttgaaccgatttagcaaaacgtggcatcggtcaattcattcatttgacttatacttgcctgggcaatattatcccctgcaactaattacttgccagggcaactaatgtgaaaagtaccagcgatctgttcaatgaaattattccattgggtcgcttaatccatatggttaatcagaagaaagatcgcctgcttaacgagtatctgtctccgctggatattaccgcggcacagtttaaggtgctctgctctatccgctgcgcggcgtgtattactccggttgaactgaaaaaggtattgagcgtcgacctgggagcactgacccgtatgctggatcgcctggtctgtaaaggctgggtggaaaggttgccgaacccgaatgacaagcgcggcgtactggtaaaacttaccaccggcggcgcggcaatatgtgaacaatgccatcaattagttggccaggacctgcaccaagaattaacaaaaaacctgacggcggacgaagtggcaacacttgagtatttgcttaagaaagtcctgccgtaaacaaaaaagaggtatgacgatgtccagacgcaatactgacgctattaccattcatagcattttggactggatcgaggacaacctggaaagcccactgagtctggagaaagtgagtgagcgtagcggttactccaaatggcacctgcaacggatgtttaaaaaagaaaccggtcatagtttaggccaatacatccgcagccgtaagatgacggaaatcgcgcaaaagctgaaggaaagtaacgagccgatactctatctggcagaacgatatggcttcgagagccaacaaactctgacccgaaccttcaaaaattactttgatgttccgccgcataaataccggatgaccaatatgcagggcgaaagccgctttttacatccattaaatcattacaacagctaattgaaaacgtgacaacgtcactgaggcaatcatgaaaccacttagttccgcaatagcagctgcgcttattctcttttccgcgcagggcgttgcggaacaaaccacgcagccagttgttacttcttgtgccaatgtcgtggttgttcccccaagccaggaacacccaccgtttgatttaaatcacatgggtactggcagtgataagagcgatgcgctcggcgtgccctattataatcaacacgctatgtaatttgttctggccccgacatctcggggcttattaacttcccacctttaccgctttacgccaccgcaagccaaatacattgatatacagcccggtcataatgagcaccgcacctaaaaattgcagacccgttaagcgttcatccaacaatagtgccgcacttgccagtcctactacgggcaccagtaagcttaacggtgcaacccgccaggtttcatagcgtcccagtaacgtcccccagatcccataaccaacaattgtcgccacaaacgccagatacatcagagacaagatggtggtcatatcgatagtaaccagactgtgaatcatggttgcggaaccatcgagaatcaggctggcaacaaagaagggaatgattgggattaaagcgctccagattaccaggctcatcaccgccggacgcgtactgtggctcatgatctttttattgaagatgttgccacacgcccaactaaatgctgccgccagggtcaacataaagccgagcatcgccacatgctgaccgttcagactatcttcgattaacaccagtacgccaaaaatcgctaaggcgatccccgccaattgtttgccatgcagtcgctccccgaaagtaaacgcgccaagcatgatagtaaaaaacgcctgtgcctgtaacaccaggctagccagtccagcaggcataccgaagttaatggcacaaaaaagaaaagcaaactgcgcaaaactgatggttaatccataccccagcagcaaattcagtggtactttcggtcgtgcgacaaaaaagatagccggaaaagcgaccagcataaagcgcaaaccggccagcatcagcggtggcatgttatgaagccccactttgatgaccacaaaatttagcccccatacgaccactaccagtagcgccaacaccccatcttttcggctcattctaccgcctctgaatttcatcttttgtaagcaatcaacttagctgaatttacttttctttaacagttgattcgttagtcgccggttacgacggcattaatgcgcaaataagtcgctatacttcggatttttgccatgctatttctttacatctctaaaacaaaacataacgaaacgcactgccggacagacaaatgaacttatccctacgacgctctaccagcgcccttcttgccagcagcttgttattaaccatcggacgcggcgctacgctgccatttatgaccatttacttgagtcgccagtacagcctgagtgtcgatctaatcggttatgcgatgacaattgcgctcactattggcgtcgtttttagcctcggttttggtatcctggcggataagttcgacaagaaacgctatatgttactggcaattaccgccttcgccagcggttttattgccattactttagtgaataacgtgacgctggttgtgctcttttttgccctcattaactgcgcctattctgtttttgctaccgtgctgaaagcctggtttgccgacaatcttagctccaccagcaaaacgaaaatcttcagtatcaactacaccatgctaaacattggctggaccatcggtccgccgctcggcacgctgttggtaatgcagagcatcaatctgcccttctggctggcagctatctgttccgcgtttcccatgcttttcattcaaatttgggtaaagcgcagcgagaaaatcatcgccacggaaacaggcagtgtctggagcccgaaagttttattacaagataaagcactgttgtggtttacctgctctggttttctggcttcttttgtaagcggcgcatttgctagttgcattagtcaatatgtgatggtgattgctgatggggattttgccgaaaaggtggtcgcggttgttcttccggtgaatgctgccatggtggttacgttgcaatattccgtgggccgccgacttaacccggctaacatccgcgcgctgatgacagcaggcaccctctgtttcgtcatcggtctggtcggttttattttttccggcaacagcctgctattgtggggtatgagtgctgcggtatttactgtcggtgaaatcatttatgcgccgggcgagtatatgttgattgaccatattgcgccgccagaaatgaaagccagctatttttccgcccagtctttaggctggcttggtgccgcgattaacccattagtgagtggcgtagtgctaaccagcctgccgccttccagcctgtttgtcatcttagcgttggtgatcattgctgcgtgggtgctgatgttaaaagggattcgagcaagaccgtgggggcagcccgcgctttgttgatttaagtcgaacacaataaagatttaattcagccttcgtttaggttacctctgctaatatctttctcattgagatgaaaattaaggcaagcgaggaaacacaccacaccataaacggaggcaaataatgctgggtaatatgaatgtttttatggccgtactgggaataattttattttctggttttctggccgcgtatttcagccacaaatgggatgactaatgaacggagataatccctcacctaaccggccccttgttacagttgtgtacaaggggcctgatttttatgacggcgaaaaaaaaccgccagtaaaccggcggtgaatgcttgcatggatagatttgtgttttgcttttacgctaacaggcattttcctgcactgataacgaatcgttgacacagtagcatcagttttctcaatgaatgttaaacggagcttaaactcggttaatcacattttgttcgtcaataaacatgcagcgatttcttccggtttgcttaccctcatacattgcccggtccgctcttccaatgaccacatccagaggctcttcaggaaatgcgcgactcacacctgctgtcacggtaatgttgatatgcccttcagaatgtgtgatggcatggttatcgactaactggcaaattctgacacctgcacgacatgcttcttcatcattagccgctttgacaataatgataaattcttcgcccccgtagcgataaaccgtttcgtaatcacgcgtccaactggctaagtaagttgccagggtgcgtaatactacatcgccgattaaatgcccgtaggtatcattaaccaatttaaatcggtcaatatccaacaacattaaataaagattcagaggctcagcgttgcgtaactgatgatcaaaggattcatcaagaacccgacgacccggcaatcccgtcaaaacatccatattgctacggatcgtcagcaaataaattttgtaatcggttaatgccgcagtaaaagaaagcaacccctcctgaaaggcgtcgaaatgcgcgtcctgccagtgattttcaacaatagccagcattaattcccgaccacagttatgcatatgttgatgggcagaatccattagccgaacgtaaggtaattcatcgttatcgagtggccccagatgatcaatccaccgaccaaactggcacagtccataagaatggttatccgttatttctggcttactggcatctctcgcgaccacgctgtgaaacatactcaccagccactggtagtgggcatcgatagccttattgagatttaacaagatggcatcaatttccgttgtcttcttgatcattgccactcctttttcacagttccttgtgcgcgctattctaacgagagaaaagcaaaattacgtcaatattttcatagaaatccgaagttatgagtcatctctgagataacattgtgatttaaaacaaaatcagcggataaaaaagtgtttaattctgtaaattacctctgcattatcgtaaataaaaggatgacaaatagcataacccaataccctaatggcccagtagttcaggccatcaggctaatttatttttatttctgcaaatgagtgacccgaacgacggccggcgcgcttttcttatccagactgccactaatgttgatcatctggtccggctgaacttctcgtccatcaaagacggccgcaggaataacgacattaatttcaccgctcttatcgcgaaaaacgtaacggtcctctcctttgtgagaaatcaaattaccgcgtagactaacgctagcgccatcgtgcatggtttttgcgaaatcaacggtcattttttttgcatcatcggttccgcgatagccatcttctattgcatgaggcggcggtggcgctgcatcctgttttaaaccgccctggtcatctgccaacgcataaggcatgacaagaaaacttgctaatacaatggcctgaaatttcatactaactccttaattgcgtttggtttgacttattaagtctggttgctatttttataattgccaaataagaatattgccaattgttataaggcatttaaaatcagccaactagctgtcaaatatacagagaatttaactcactaaagttaagaagattgaaaagtcttaaacatattttcagaataatcggatttatatgtttgaaaattattatattggacgagcatacagaaaaagcaaatcacctttacatataaaagcgtggacaaaaaacagtgaacattaatagagataaaattgtacaacttgtagataccgatactattgaaaacctgacatccgcgttgagtcaaagacttatcgcggatcaattacgcttaactaccgccgaaagttgcaccggcggtaagttggctagcgccctgtgtgcagctgaagatacacccaaattttacggtgcaggctttgttactttcaccgatcaggcaaagatgaaaatcctcagcgtaagccagcaatctcttgaacgatattctgcggtgagtgagaaagtggcagcagaaatggcaaccggtgccatagagcgtgcggatgctgatgtcagtattgccattaccggctacggcggaccggagggcggtgaagatggtacgccagcgggtaccgtctggtttgcgtggcatattaaaggccagaactacactgcggttatgcattttgctggcgactgcgaaacggtattagctttagcggtgaggtttgccctcgcccagctgctgcaattactgctataaccaggctggcctggcgatatctcaggccagccattggtggtgtttatatgttcaagccacgatgttgcagcatcggcataatcttaggtgccttaccgcgccattgtcgatacaggcgttccagatcttcgctgttacctctggaaaggatcgcctcgcgaaaacgcagcccattttcacgcgttaatccgccctgctcaacaaaccactgataaccatcatcggccaacatttgcgtccacagataagcgtaataacctgcagcatatccgccaccaaaaatatgggcgaaataactgctgcgatagcgtggcggtatagcaggaagatccatattttccgccaccagcgcccgcaattcaaaatcatcgacatcctgcattgcttcgttttcttccaggcaatgccagcgcatatcgagaagtgcggcgctaagcagttcgctcatctcataccctttgttgaacaggctggcattacgcattttctgttgcagttcgtcaggcattgctgccccgctctgataatgccgggcgtagcgagcgaatacctgcggatgcgttgcccagtgttcgttgatttggctcggaaattcgacaaaatcacgcggcgtgttggtgccggaaagcgtggcataacgctggcgggcaaaaaggccgtgcagcgtatgaccaaattcatggaataaggttatgacatcatcccagagtaacaacgcaggctcaccggcagcgggtttctgataattgcagacgttataaattaccggatgtgttttattaagcgtactttgctcaacaaaattgcccatccatgcaccgccgcttttactatcacgggcgaagaaatcaccgtaaaataacgccagccccacgccattatgatcaaaaatttcccacacacgaacgtcaggatggtagacaggaatatcaaaacgttcgacaaacttaataccgaagagctgattcgcggtccagaatacaccttcatttaacaccgtgtttaattcaaaatatggcttgagctgcgcctcatcaagatcaaatttctcccgccgtacctgttccgcataaaatgcccagtcccacggctgcgcgctaaacccgccctgctgcttatcgataaccgcctgtatggaggctaattcatcgctcgcacgttgacgcgccgctggaacaatttcccgcataaagttaagtgctgcttcaggtgtttttgccatctgatcggcgattttccatgcggcataatgaggaaaaccaagtagtgttgcctgttgtgcacggatctccaccagacgttgaatgatagcgcgggtatcattggcatcatttttttccgctcgcgtccagcccgcaataaacagtttttcacgcgtcgcacgatcgcgcatttcggcaagcgccggttgttgggtggtattcagcagcggaatcagccatttgttatccagacctttctcgcgagccgcctctgccgccagcgcaatctcttgctcactcattcctgccagctgcgcgatatcgttcacaaccagaccgccggatttatttgctgccagtaatcgctggttaaactggctggtcagggtcgcagcttctgtattcagtacttttaattttgctttatcagcttgcgcaagtttggctccggcaaggacaaaacgttgatgaatcacctccaccaggcggatggattcactatcaagccccagggattcacggcgctgccagacagcatctacccgcgcgaataattcaccgttcagatagatatcattagccagttccgccagttcagcggaaaactgctcgtcaagacgctgtaattcatcattggtatgcgccgcagtcatcgcaaaaaagacgctggtaacgcgggtaagtaattctccgctttgttccagtgccagaatagtattgttgaaatcaggcatttgcgggttaagcgcgatggcagcaatttctgcccgcttttgctgcattccctcatcgaatgccgggcgatagtgatgattggcaatttgatcaaaatggggagccagatacggcagtgtgctttgcacaaggaaaggattcattgttgtcattttcttctcctgaacgcgaggtgttccatagcgtaggcttactgataacggagtgcaatcttgcaatccagtattacccgctcttaagcatcccgtgctatgttattgacacacaaaagcgttgaggaacagtgagaagcgcagtgcccagccatcccgatactgctgctttcaccaaatccttagtgcttctttcgtgtttttctattgtcataatggttatctctaaaaaagaggtaagatgcgtactacttactcgccgttattggtattattcagaaaaagtgagtaagactttgcagcaatgtttttgatcctgttcaaataaactaatggcatcagcaacatgctggaaatcaaacgtatgggtaattaatttttctggtttaattaaccctttacttaaccagtcgataacgatcgggaatttatttgcatttaagcgactagagaaaatagagagttcttttccggtaattccttgctgaatcacttcagacggttcactggagaaccccatcaatacaatacgtgccgctggagaagccagcgttacggcctctttcaggatagaaggatgacaagccgcatcgataattaatgtcggcttgatgcctttttcagtgaaaatctcgccaagcggtgtctggctgttattaatcgcccagtcagccccgctctctttcgctttttccagtcgttcatcaatgcgatcggcaacaatcacatttttaacgttatagacgccttttaatacctgaacgatcgtcaggccgattggaccggcaccataaaccagaacggtatcattttcagtcggttgaccatgtccggttacgttagccgcaatggtaaaaggttcgatcattaccgcatattgatcggccactgcttcaggaattttccacgcattttttgccggaaccacggcatattcactgaaaccaccgtcagcgtgcacacctaatacagccagtgtcgtacaaacgttcggtttacctatagagcacggatagcaatgcccacagctgaccaccggatcgacagcaacacgttcaccgactctggcgctttccacgccttcacccactgcatcaatgacgccaaagaattcatgaccaatgacgcgcggatatttcgcaaaaggattatgcccacgataaatatggctatcactaccacaaattccggcaagtttcacttttactcgtacttcacccgcactcggggtgggtatttcacgttcgacaatcgccagttgattcggtttttcaattaatatgcttttcattatcttactccttaccagttccacagcgtgccatcttccagacgtgcgactggtagataagcaggttcatagggatatttcgccgccagcttttcatcgaattcgataccaagacccggtttgtctcccggatgcatatagccgttatcgaaagtccagttgtgcgggaagacttcgagcatttgttcggaataacccatgtattcctggacaccgaaattggggacccacagatcaaagtgcagcgccgcagccatgcagactggactcaaatcggaaggaccgtgactgccagtacgtacctgatacaggctagcaaaatcggcaatccggcgcataccggtaattccgcctgcatgggtcagcgtggtgcggatataatcgatgagttgctcttcaatcagttgtttgcagtcccagatgctgttgaagacttcacccactgcgatgggtgtgacggtatgttggcgaatgagacggaagcattcctggttttccgcaggcgtcgggtcttccatccagaacatgcgataatcttcaatgcttttaccaaagcgcgccgcttcaataggcgttaagcgatggtgcatgtcatgcagcaaatgttcattaaaaccaaacttgttacgtaccgcgtcaaacaatttcggcatgaaatcgaggtatttctccgtgctccacagctgctcttccggccactgtcctttggttgcgggttcataagccagacctttacctttgctcatgccgtaggtggttttcataccagggattccgcactgcacgcggatggctttgaatccaagctcttgatgacgggcataatcatccagagcttcatcaatactgtgaccggtggtatggcaataaaccatcaccccttcacgagacgcgccgccgagtaactggtaaagcggcatgttggcagctttggctttaatatcccacagcgccatatcaaccgcactaatggcgctcatcgtaaccggaccgcgacgccagtaagcacctttatagaaaaactgccagatatcttcgatacggtgcgcatcgcgaccaataagctgcggacaaaggtgatcctgcaaataagaggccacggaaagctcacgtccattgagggtggcatccccaaggcccgtaataccgtcctcagtggtgatttttaatgtgacgaaattacgccccggacaggtaacaaaaacttcagcctttacgatcttcatgttcgattccttgcatcgcttgtcgtgatgcatgaaatctacgcaactgagctactaccatacaagtataaagatcgaaaaaagccggagtgatcacaaaaaaaggcgtatatttgcgctgtgaatggttgacaaaagatgaaatagaataccttttgtcagctgacacttcctcttatcttattgataaaatggatttatgttcttacgtgcgcccccagcccgcaacaatgatcaacatgccgcaaagcgcaatcaacgcacccgtccagtcataaagagtcagtttcacgccatccacaacgcgcagccacatcaacgccgtgcagacataaacgccaccataagccgcgtaaacacgcccactcgccgctggatgcaacgttaacaaccagacaaacagcgccagactaatccccgccggaagcaacagccagatactggcgtttcgttttaaccacaaccagggcagaaagcatccaataatttcacacagcgcagtagcaaaaaatagtaacgttgttttaatcatctttgtctcttattgacatcatgtatagttatagggcgacataatatcatcaatataaacaccctcctggtacgttttgcgtccgcagtggatggtgtagaatcacctttaatcattcatacagggaatgaattatgaaaatcactctcagcaaacgaatcggcctgctcgctattctgctgccttgcgcactggcattgagcacaactgttcatgccgaaactaacaaactggtgattgagtctggcgacagtgcacaaagccgccagcacgccgctatggaaaaagagcaatggaatgacacgcgcaatctgcgccagaaagtgaataaacgcactgaaaaagagtgggataaagccgacgccgcttttgataaccgcgataaatgtgagcaaagcgccaacatcaatgcctactgggagcccaatactttgcgctgcctggaccgtcgaactggccgcgttattaccccctaacctgttattgatttaaggaatgtaaggacacgttatgccaagcgcccacagtgttaagctacgcccgctggagcgtgaagatttacgctatgtacatcaactcgacaataacgccagtgtgatgcgttactggtttgaggaaccctacgaagcctttgttgaactctctgatctgtatgataagcatattcacgatcagagcgaacggcgctttgtggtggaatgtgacggcgaaaaagccggtctggtggagctggtggaaattaaccatgttcatcgccgcgcagaatttcagataattatctccccggagtatcaggggaaaggtctggcaacccgtgccgccaaattagcaatggactatggctttaccgttctcaatctctataagctgtatctgatcgttgataaagagaatgaaaaagcgattcacatttaccgcaagcttggctttagcgttgaaggtgaattgatgcacgagttctttattaatggtcaatatcgtaatgccattcgcatgtgtatattccagcatcagtatctggcagagcacaaaacaccgggtcagactctcctgaagccgaccgcacaataacattaataataatcgatcgtatttttgatggtgtaaacccgttcgacggcgggttttactccttcatcaacaatgattagctgacagtccaccggattagcgtgactgtcatattcacagctctgttttacattaccaacccgttgattattcagtaaagtaaccgctgtgtaatctaattttttgatcggatccgtacttggcgtggcgctgacagataatgttttgtcgttacttttcgtggttttacccagcggataaccctgatcatcatagcgatattccatctgcatttgtttgctgctggctttaatcacgaagccattatcatcggtttcccaactcaccccggcagaaggtaattctgctagctggcattttccctgtaaacgtactctcttctccagcgtctcggcatcacggtaataattggcgtccagtaccagagcgaccacggtattattttccagatccagtaattcgagactatcaaaacagccttcttcgctcaaagtcccagaaacacgtttcgtcacttcaccttgctcatccattaatgtctgagtgaaatcttttaccggaccacgcagcggatcaaaatcgaattcattagagaaactggccatctcaggggtaaaactaagtgttacctctgtgcggtcacatcctgtgaggaatatcgcgagtaagcatggtagtaatttgtatttcacaacagtcaccagagagtagagatgattctcaatcatagtagcaaatacagtactttacacgttaaatgctatgcttaaagaagttatcttcgcgtaaggagcttatgatgaaactcagtacctgctgtgccgcgcttctgctcgccctcgccagtcccgcggtactcgccgcgccgggatcctgtgagcgcatacagagcgatataagtcagcgcattatcaataatggcgtacccgaaagcagcttcacgttaagtattgtacccaatgaccaggttgatcagcctgattcccaggtcgtcggccattgcgctaatgatacgcataaaattctctatacccgcaccaccagcggtaacgtctctgctcccgcgcagtctagccaggatggcgcgcctgccgaaccgcagtaacacattatcgactgaacgccggatatgacaaatccggcgatttgaacatacaacataatcccaccttattactcatacccttctattgatatggattaataattcttaacccaaaatgggtagactccctctattgttagcgcgctaaatattcaatatataaacttttatataacgataaagaacagggagtgagttatgtccaaaaatgaacgaatggtgggcatcagccgcagaacactcgttaaatctaccgcgataggttctctggcgctggctgcaggcggtttttctttgccgtttaccctgcgcaatgcagcagcagcggtacaacaggcccgcgaaaaagtggtctggggtgcctgttccgtcaactgtggtagccgctgtgcacttcgtctacatgttaaagataatgaagtgacctgggtggaaactgacaataccggcagcgatgagtacggcaaccatcaggtacgcgcctgtttgcgcggtcgctccatccgccggcgtattaatcatcccgatcgcttgaattacccaatgaaacgcgtgggcaaacgcggcgaaggcaaattcgaacggattagctgggatgaagccctggatactatcgccagtagcctgaagaaaaccgtcgaacaatatggcaatgaggctgtatatattcagtactctagcgggatcgttggcggcaatatgacccgctctagcccaagtgccagcgcggtcaaacgcctgatgaactgctacggcggtagtctcaaccagtatggctcctacagcactgcgcaaatttcctgtgccatgccctacacctacggcagtaatgatggcaacagcaccacggatattgaaaacagcaagctggtcgtgatgtttggtaacaacccggcagaaacccgcatgagcggtggtggcatcacttatcttcttgaaaaagcgcgcgagaaaagcaacgccaaaatgattgttatcgatccgcgatataccgatacggctgccggtcgtgaagacgaatggctccctattcgcccgggcaccgatgccgcgctggttgcgggtattgcctgggtattgattaacgaaaatctcgttgatcaaccttttctcgataaatactgcgtcggctatgacgaaaaaaccttacccgcagatgcacccaaaaatggtcactataaagcctatattcttggtgaaggtgacgataaaacagcgaaaacgccgcagtgggctagccaaattaccggtatcccggaggaccgtatcatcaaactggcgcgtgaaattggcacagcaaaacccgcttatatctgccagggctgggggccacaacgccaggcaaacggcgaactgactgcacgcgctattgctatgttacctattttgacgggcaatgtcggcatcagcggcggaaatagtggcgcgcgtgaaagcacctataccattaccatagaacgcctgccggtgctggataatccggtcaaaacgagtatctcctgcttcagctggacagatgctatcgatcatggtccgcaaatgacggcaatccgcgacggcgtccgcggcaaagataaactggatgtgcccattaagttcatctggaactacgcgggaaataccctcgttaatcagcattctgacatcaacaaaacgcatgaaattctgcaggacgaaagcaaatgcgaaatgattgtggtcatcgaaaactttatgaccagtagcgcaaaatatgccgacattctgctgccagacctgatgaccgttgagcaggaagatattattcctaacgactacgccggtaacatgggatatctcattttcctccagcctgtcaccagcgaaaaattcgaacgcaaaccgatttactggatcctgagtgaagtcgcgaaacgtcttggacctgacgtctatcaaaagttcacagaaggtcgcacgcaggaacaatggttacaacatctgtacgccaaaatgcttgccaaagatccggcgttaccgtcttacgacgaactgaaaaaaatgggtatctataagcgtaaagatcccaatggccattttgtcgcctacaaagcatttcgtgacgaccccgaggcaaatccacttaaaacgccttccggtaagattgaaatttattccagcaggctggcggaaattgcccgtacctgggaactggaaaaagatgaagtgataagcccattgccagtttatgccagtacctttgaaggctggaactcccctgaacgtagaaccttcccactgcaactgtttggtttccattacaaatcccgtactcacagcacctacggcaatattgatctcctgaaggctgcctgccgtcaggaggtgtggatcaaccctatagatgcgcagaaacgtgggattgccaacggcgatatggtgcgggtgtttaaccatcgtggcgaagttcggctaccagccaaagtaacaccacgtattctccctggagttagcgctatgggccagggagcctggcacgaggccaatatgtctggcgataaaatcgaccatggcggctgtgtgaatacgctaaccactctgcgccctagtccactggcgaagggaaacccgcagcacactaatctggtcgagatcgaaaaaatataacccacgacaaccataaattctggcatgacattttgtttgaaaagcaataagtgagtaatgatgaaaatccataccacagaggcgctcatgaaggctgaaatcagccgtagaagtctgatgaaaacctccgcacttggcagtcttgcgctggcaagcagtgctttcactctgccattttcccaaatggtccgggcggcagaggctccggtagaagagaaagcggtctggagttcctgcaccgttaactgcgggagccgctgtctgttacgtttgcatgtgaaagatgacaccgtgtactgggtggagtctgatacgacaggtgacgacgtctacggtaatcatcaggttcgagcgtgtttacgcgggcgctctatccgccgacggatgaatcatcctgataggttgaaatatcccatgaagcgcgtcggcaagcgcggtgaaggtaaatttgaacggataagttgggacgaagccctggataccatcagtgataatcttcggcggatcctgaaagattacggcaatgaggctgtacatgtcctgtacggaacaggcgtagatggcggaaacatcaccaacagtaacgtcccgtaccgtctgatgaactcttgcggtggttttctcagtcgctatggcagctacagtaccgcacagatcagtgccgcaatgagttatatgttcggtgccaatgatggcaacagcccggatgatatcgccaatacgaaactggtcgttatgttcggaaataacccggcagaaacgcggatgagcggcggtggtgtcacttactacgtcgagcaagcccgcgaacgtagtaacgcacgcatgatcgtcatcgatccacgttataacgacactgctgccgggcgtgaagatgaatggctgcccattcgccctggcaccgatggcgcactggcctgtgcgattgcctgggtactgattactgaaaacatggtcgatcagccatttctcgacaaatattgtgttggttacgatgaaaaaacgctgcccgccaacgcaccacgtaacgcgcattataaagcctatattctgggcgaagggcctgacggcatagctaaaacgccggaatgggcagcaaaaatcaccagcatcccggcagaaaaaattatccagttggcacgagagatcggtagtgcaaaacctgcttatatttgtcagggttgggggccacaacgacattccaacggcgagcaaacatcccgcgctattgccatgcttttcgttctcaccggcaacgtcggcataaacggcggcaacagtggcgtacgcgaaggtagctgggatctgggggtagaatggttcccgatgctcgagaatcctgttaaaacgcagatttccgtctttacatggacagatgccatcgaccatggtacggaaatgaccgcgacccgtgatggtgttcgtggaaaagaaaaactggatgtccccatcaagtttttatggtgctacgccagtaacacattgatcaatcaacatggcgacatcaatcacacccatgaggtgcttcaggatgacagcaagtgcgagatgattgttggcattgaccacttcatgacggccagcgctaagtattgcgatatcctgttgcccgacctgatgccaacagagcaagaagaccttatctctcatgaatctgcagggaatatgggctatgtgatcctcgcccaacccgcaaccagtgcaaaatttgaacgcaaacccatctactggatgctgagtgaagtcgccaaacgcttaggaccagacgtttatcaaacctttactgaaggtcgcagtcagcatgaatggatcaaatatctccatgcgaaaacgaaggaacgtaaccctgagatgcccgactacgaggagatgaaaacgaccgggatctttaagaaaaaatgcccggaagaacactacgtcgctttccgcgcattccgtgaagatccacaggcaaacccgttgaaaacacctagcgggaaaatcgaaatttattctgaacgactggcgaagattgcagatacctgggaattgaaaaaagatgaaattattcatccccttcctgcgtataccccaggttttgatggctgggacgatcccctgcggaaaacctatccactgcagttaacgggcttccattacaaagcgcgtacccactccagctacggcaatattgatgtgttacagcaggcctgcccacaagaggtgtggatcaaccccattgatgctcaggcacgcggtatccgtcatggcgataccgtgcgggtatttaacaataatggagaaatgctgattgccgcaaaagtgactccgcgtattctgcctggcgttaccgccatcgggcaaggtgcgtggcttaaagcggatatgtttggtgaccgggtcgatcacggcggcagtatcaatattctgacctctcaccgccctagtccgctggcaaagggaaacccgagccacagcaatcttgtccagatcgaaaaggtttaaggagtagcccatgaccacacaatatggattttttatcgattccagccgctgtactggctgtaaaacctgcgaactggcgtgcaaagattttaaagatcttggcccggaagtcagtttccgccgtatttatgaatacgctggcggcgactggcaggaagataatggcgtctggcaccagaacgtgttcgcttattatctctccatctcctgtaaccattgcgatgaccccgcatgtacaaaagtctgccccagcggcgcaatgcataagcgtgaagatggctttgtggtggttgatgaagatgtttgtatcggctgccgctactgccacatggcttgtccgtacggcgcgccacagtacaatgctgaaaaagggcacatgacgaagtgcgatggttgttatagccgcgtcgccgaggggaaacaacccatatgtgtcgaatcctgcccgctgcgtgcacttgagttcggtccaattgaagagctgcgccagaagcacggcactcttgctgccgtcgcgccactgccgcgcgcgcatttcacaaaacccaatatcgttatcaaacctaacgccaacagccgcccgaccggcgataccactggttatctggctaatccggaggaagtgtaaaatgggaaatggatggcatgagtggccactggttatctttaccgtattgggtcaatgcgtagtaggcgcgctgattgttagcggaattggctggttcgccgccaaaaatgacgcagaccgtcagcgtattgtccgtggcatgtttttcctctggctgttgatgggcgtcgggtttattgcctctgtcatgcacctgggaagcccactgcgggcgtttaactccctgaatcgaatcggagcttctggtctgagtaacgagattgctgccggttccatattttttgccgttggcggattatggtggctggtggcagtcatcggtaaaatgccgcaagcgttggggaaactctggttacttttcagcatggcgctcggcgtcattttcgtctggatgatgacctgcgtgtatcaaatcgacaccgtgccaacctggcataacggttacactacgctggctttcttcctgacggtattgttgagcggtccaatacttgctgccgcaattctgcgggcagctcgcgttacatttaataccacaccatttgccatcattagcgttctggcgctgatcgcttgtgccggggtgattgtgctgcaaggtttgtctctggcgtctattcacagttccgtgcaacaagccagcgcactggtaccagattacgcctccttacaggtctggcgtgtggtattgttatgcgcaggtcttggatgctggctttgcccgctcattcgtcgccgtgaacctcacgttgccggacttattctggggctaatcctcatacttggcggtgagatgatcgggcgtgtgctcttttatggcctgcacatgacagtaggaatggctattgcaggttaacaaattggtgcggggcaacccgcacatttcaggatgttaggaatgacccattttagtcagcaagataatttttctgtcgcggcgcgcgtgttgggcgcgctgttttattacgctccagagagtgcggaagccgcacctctggttgcggtactcaccagtgacggctgggaaactcagtggcctctaccagaagcgagtttagcgccgctggtgacggcttttcagacacagtgtgaagagactcacgcccaggcctggcagcgtttgtttgtcggcccgtgggcactgccgtctccgccgtgggggagcgtctggctggatcgcgaatctgtgctgtttggcgatagtacattggcacttcgtcagtggatgcgcgagaaaggcattcagtttgaaatgaagcaaaacgaaccggaagatcattttggtagtctgctgttgatggctgcgtggttggcggagaatggtcgccagacagaatgcgaagaattgctggcatggcacctttttccgtggagtacacgttttcttgatgtttttatcgaaaaagcagaacaccctttctaccgtgcactgggtgaactggctcgcttaacgctggcgcaatggcaaagtcaactgttaattcctgtcgcggttaaaccgctgtttcgataagatcaccgtaatattgccggatggtgacgattacgcgcaatccggcaataataggttacagtgtcacgtttttttatctcttaaagcacgcactgcttttgcggctggcctcttttgccgcaaaatagtcgcccgtgtttcattgcccatttctgctcatgcatcatctacacatctatccggatctgcgcactatgttccaccgtctgcttatcgcaacagtcgtcggtattctcgcggcctttgccgttgccgggtttcgtcatgcgatgctgctactggagtggttgttcctcaataatgactccggcagtctggtcaatgcagcgacaaacctttccccctggcgacggttgctaactccggcgctcggcggactggcggcgggtttgttgctgatgggctggcagaaatttacccaacaacgccctcatgcgccgaccgattatatggaagcgttgcaaaccgatggacagttcgattacgcagcaagcctggttaaaagccttgcctctctgctggtagtaaccagcggcagtgcaattggtcgcgaaggtgcgatgattcttttagctgcccttgccgcctcctgttttgcccaacgttttacgccacgccaggagtggaaattatggatcgcctgtggggccgcggcgggaatggctgcggcctatcgtgccccgcttgctggcagtttatttatagccgaagtgctgtttggcactatgatgttggcctctctcggcccggtgattatttccgccgtcgtggcattgctggttagcaatctgattaatcatagcgacgcgttactctacaacgtacaactcagtgtgacggttcaggctcgtgactatgcgctgattatcagtacaggtgtgctggcaggtctgtgcggaccactgttgttaacgttaatgaacgcctgtcatcgtggatttgtgagtctcaaacttgcgccgccctggcaactggcactaggcgggttgatcgtgggtctgctttccctgttcacacctgcagtgtggggcaacggctatagcaccgtacaatcctttttaaccgccccaccactgttaatgatcattgccgggatcttcctttgtaaactgtgtgccgtgctggcgagtagcggttccggcgcacccggtggggtctttacaccgacgctatttatcggtcttgccattggcatgttgtatggtcgtagcctgggattatggttccctgatggcgaagaaattacacttttactcggattgaccgggatggcgacactgttggcggcgaccacgcacgcgccgattatgagcacgttgatgatatgtgaaatgaccggggagtatcagctactccccggtttattgattgcctgcgtaattgcgagcgtaattagccggacgttacaccgtgactctatctaccgccagcacactgcgcagcatagctaagcggatgtattgccccagttcacgctgttcggcgcgcggcagataaggcagttcaccaatgagcggtgccggaagttttttacccagcacatcaatgatttccgcataatgcgccagtcctgggttgattcggttagccacccagccaatgagcggcagcccgtcgttggcgatcgcctgagctgttagcagtgcatggttaatgcaaccttcctgaataccgacaaccatcaacaccggcagttgttcctgcactacccattcagagagtggacgcaaatcattcatcagactgcgccagccgccagtcccttctaccacgacatgatcgactttttcggtcaggtttgccaggccgttactaatgagggtgtaattgattgggcaactgtgcgccacgctactttcttcttcgcttaacgcgataggattaactgcttcataaggcagttcgatggtactaacactctgcaacaccagggcatctttattacgcagcccttcgggtgtctctttgctccccttcgctacgggtttatatcccgcaaccgtttttccctgggaggctaacgcttgtagcaatgcgcgggaaaccaccgttttccctacagaagtgtctgtaccggtaataaagaaacgcttcagcatcactaactccaccgttatgcttcacaaatataaaccaggaaaataattaaccttgaaagtctaagttatgctttcctggcccaaattgagatagcgcaaattttggtagaacagttaaaaaatgttaaccctgcaacagacgaatcaacaaagaaccgttatacatcgcgtcttttaccagtgcagcgcctgccatcgtgccctggttagaaaactgagtactctcaacgctgatgtgctgactatacgcaggaagggcctgctgacggatgctgtcactgatgaccgggaagaggatatctgccgctttacttaacggactgccaatcagtattttttgtgggttaaataaattcaccatgatggcaagaatgcgcccgacatgcgcgcccaccccggtaatgatgtcttttgccagtagatcgccgcgcaatgccgcctgacacaaactgtccacggttaacggttgtccatgtaacatgctgctcatggattgattaagacgcagctgtgccagctcaagaatactgtccacgctggcgatggtttcgaggcagccgtgattcccgcaataacagcgtttcccatacgggtcgacctgtgtgtggcctatttccacgagactactgctgcctgcgtgtagcagatgaccatcggtaatgacgcccgcccccacgttgtgatcgataaccacctgaatcacatcgcgcgccccgcgactggcaccaaacaaggcctctgccatcgtccatgcgctgatatcatgctgaatataaaccggaacgccggtatgctgctccagcgcctcgccgagcggcatctcttttacatcctcgtagaacggcatgcgatgtacaataccattttccgtatcaataattcccggcaaggttatggcaatgctagttagacgctcaagttttttctggtggcggataaaaaactgatcgatatgggaaataatacgatccagcaatggcaagtcatcttttaacgccagttcctggctctcttccaccaccagtttgctgctcagatcgcgcagagcaaggaaaatctccccgcgactaatgcgcagagaaagatagtgccaggcttcagtttcaaccaccagccccaccgccggacggccacggttccccgcttctttgatttccagctcttgcaccaggtgtgcttcgagcatctcacggacaattttagtgatactggcaggagccagttgcgccagacgggaaagatcgatacggctgactggaccaagctgatcaatcaggcgataaaccgcgcccgcgttggtctgctttatttgatcaatgtgcccaggctggttttcagcaaccaccgcatactccctatattttcgcgctccgaaataatctgtaggctatggtgaagcacttcaatacgtgtcgtcaaatttttacttaggcatgtgattaacagcacatttttcgggctttttcgctgaaatttccctcacctgagagcattcagcagatgaatacgaaagttacgcgcagccggactttgttcatgatgtttcggccagaccaaccacatttcagaaaccgcatcctcttcagcaatcggcacccagcgcatttcgttgagctgaacacgtttaaaactcgcaggcaaaatactaacacccagaccggcggaaaccagaccgatgatggtcattgcctcgcccacctcctgagtgatgacgggcgtcaaatggtaacgtcgcatcagcccgagaatatcgtcatacagccctgtcccgacgtgcggatcaaaaaagacaaagggttctttcgccagttcagccagcgttacattcgggttatttgccaggggatgatcgtgcgggatcatcgccataagcggttcatggacgatgactgcgtgttcaaggctctccggtaacgctgtgttacgcagcaatcccatatccagcgttccttcaatgagcggagcgatttgctcgcgagtgttcatttcgcgggtttgtaaatggacatcaggataatcacggcgaaacaggcttaacgtatcggacaccgcccgaataaaaggagcgctgctagtaaaaccaatgcgcaactcccccgcttcaccctgatgcagcctttcagcgcgagcggcagcgtcatccaccatagacaggatttgccgactatctgcaagaaactgttttcctgctgccgtcagcaatacactgcgattggttcgtgccagcagtcgggcaccaatttgttgctccagcgcctgaatctgctgacttagcggcggttggctaatattcaggcgggcagcggcgcgcccgaaatgcagctcttccgcaacagcaacaaagtaacgcagatgacgaagttcaatattcatatttaaaacatcttatttgagattattaatatattagacagaacaattcgattttcctaccctatgtataagcctgatctacaggcatatttagcaaggatttcaagtgagccgtactacaactgttgatggcgctccggcaagcgacactgacaagcaaagcatttctcagccaaatcaatttattaaacgcggtacgccgcaatttatgcgcgtcaccctggcgctgttctctgccggactggcaacatttgcacttctctattgtgtgcagcctatccttccggtgcttagccaggagtttggcttaacccccgcgaacagtagtattagtctgtccatttccacggcgatgttggctattggtttgctgtttactggcccgctatccgatgccattggtcgcaaaccagtgatggtcacggcgctactgttggcctccatttgtacgttacttagcacaatgatgaccagctggcacggcattttgattatgcgcgccttgattgggcttagcttaagtggcgtggcagctgttggcatgacttatcttagcgaggaaatccatcccagtttcgtggcctttagtatggggttgtatatcagcggcaacagtattggcggcatgagcggacgcttaattagcggtgtcttcacggactttttcaactggcgaattgctctggcggcaatcggttgtttcgcgctggccagcgcgttgatgttctggaaaatcctccctgaaagtcgccattttcgcccgactagcctgcgccctaagacgttgtttatcaactttcgtctgcactggcgtgaccggggattaccgttattgttcgcagaaggctttttgctgatggggagcttcgtcacgctgtttaattacatcggctatcggttgatgctctccccctggcatgtcagtcaggccgtggttggcttattaagcctggcttatttgaccggtacatggagcagtcccaaagccggaaccatgaccacccgctatgggcgtggtccagtgatgttgtttagcacgggggttatgctgtttggtttactgatgaccttattcagcagcctgtggctgatctttgccggaatgttactcttcagtgcaggattcttcgcagcccacagtgtagccagcagctggatcggcccccgcgcaaaacgcgctaaaggccaggcctccagcctgtatctgttcagttactatctggggagcagtattgccgggacgctgggtggtgttttctggcataactatggctggaacggcgtcggcgcatttattgctctgatgctggtcattgctctgctggtcgggacgcgtttgcatcgtcgtctgcacgcctgaaaaataagtccggactgcggtaaatacccgtccggacttattgccagctcaaaccaacgttaatagccatcctaaaatagacgaagcgccagccaattcccgcagcgcgtctagcgtcatcaggattataagtacccaaataaacggattcattttgctgtgtgtcatttattactgatgcgcagttattctactgctttgtaagtagtaaaatagttaacccgatcaagactactattattggtagctaaatttcccttaagtcacaatacgttattatcaacgctgtaatttattcagcgtttgtacatatcgttacacgctgaaaccaaccactcacggaagtctgccattcccagggatatagttatttcaacggccccgcagtggggttaaatgaaaaaacaaattgagggtatgacaatgaaaaaagtattagctctggttgttgccgctgctatgggtctgtcttctgccgcctttgctgcagagactacgaccacacctgctccgactgcgacgaccaccaaagcagcgccggcgaaaactacacatcataaaaaacagcataaagcagcacctgcccagaaagcgcaggcggctaaaaagcatcataaaaatacgaaagctgaacagaaagcccctgaacaaaaagcgcaggcagcgaagaaacacgccaagaaacacagccatcagcaaccggcaaaacctgctgcacaacccgcagcgtaagttttcaacagtaatgctggcgcgccccctcgcgcctgaaaattacggtgctaagcgggtaacgtttagcaccgcctttagcggagggtagtatggtgggccgttatcgctttgagttcattctgatcatccttattttatgcgcactgattaccgcccgtttttatctttcctgattgtagttatctgattttactcccactttcatcccgtcccgtctatagtatttatgagggtttgcttttaataatcataattacccaccagagtgtgatatgcgtacaaccattgctgtagtgttgggtgcaattagtttgacgtctgcttttgtgtttgcagataaaccagacgttgccagaagcgcaaacgatgaggtcagcaccctgttttttggtcatgatgatcgtgtgccagtgaatgacacgacccaaagtccgtgggatgcggttgggcaactggaaacggccagcggcaatttatgtacggcgacgctgattgcacccaatctggcattaacggcaggacactgtttattgacacctccaaagggtaaagccgataaagcagtggcgctgcgttttgtgagtaataaaggtctttggcgctatgagatccacgacatagaaggccgcgttgatccgacactgggaaagcggttaaaagcagatggggatggttggattgtacctcccgcagccgcgccgtgggacttcggattgattgtgctacgtaatcccccttctggcattacgccgttgccgttatttgagggagataaagccgcgcttaccgccgcattaaaagcggcaggtcgtaaagtgactcaggcaggctaccctgaagatcatctcgatacgttgtacagtcatcaaaactgtgaagtgactggctgggcgcaaacgagcgtgatgagtcatcagtgcgataccttgccgggtgacagcggtagccctctgatgttgcataccgatgacggctggcaattaattggggtgcaaagtagcgctcctgccgcgaaagatcgctggcgcgccgataaccgggccatttctgttaccggttttcgcgacaagctggatcaactgagccaaaaataatgttcaaacgctgcccgacagcgcgggcagcgtcttcatcaggcaagtttcaccatgatcattccagccaacagcaagaccaggccaatccagcctttacgatttaaccgttgaccaaacaagatccaacctgcggctaacgtggcggcaataccaaacccgccccacaatgcataagcgacagacaagtcgatccctttaacggcttgagaaagcgcactaaaggcagccagcaccgccgccagggagagcaagccaaatattttgcgacgaaagccgtcagaaaatttcaaaaagacgttagcaacgatttccagcacgattgccaatgccagccaggcggcgtgaacccattcaaactgcgccatggttcacctccagttcaggtttacgcgctttacgggtaccactttttatcaacacaatcccggcgaccagggtggttaacccggcaattttcatcaggcttaaactttcgtcgaataacaaaacgctaaacaaggtaataaataaaataccgataccttcccacagcgcataagctacgcctaaggcgatttttttaacggcgaaagagagaaatatatagctcagagaaatcatcaccagcattaaaataaagccgccatttccctcactgacgctcgcccatttcatactcagcgtaccggtaatttctgtagcaatagccagacctaataaaatccaataaatatacattgtccttctcctgcaagagaattattttaattttcgcttaattcagcgaaaccaaagtaaagtggtcaagccccgcgcatagcgcaagctttggcagaagaaaggactaaagcgcgttgcgccagtgctgctcacctacgagcaagatagtggatgaggtacgaagatgggtaaatgtagaaaataacgtcctgaacaaattgtccataatattacaattatccgcagtgttgcttctcgtcatcgcggatgataattgtcctcggtagttgaacacgcctgatttgtatcatagcttaagaattaactcaaaatattttcacttctttacctgagcggtttgattttcgttatgatgacggagcgaaaaagacattattattagcaaaggaagaaaaaacggggacaagcatggcaaagccgatcatcacgctcaatggcctaaaaatcgtcattatgttgggaatgctggtcattattctctgcggtatccgttttgccgccgagatcatcgtgccgtttattctcgcattatttattgctgttattcttaacccgctggtgcaacacatggtccgctggcgtgtgccgcgtgtactggcggtgagcattttgatgaccatcatcgtgatggcgatggtgttgctattagcttatctgggttccgcgctcaacgagttgacgcggacgttaccgcaatatcgcaactctattatgacgccgctgcaagcgcttgaaccgttgttgcaacgcgtagggattgacgtcagtgttgaccagctggcgcattatattgatccgaacgcggcgatgacgttgctcaccaacttattgacgcagttatctaatgccatgagtagtatatttttattgctgctgacggtgctgtttatgctgctcgaagtgccacaattgcccggaaaatttcagcaaatgatggcgcgtccggttgaagggatggcggcgattcaacgtgcgattgacagtgtttctcattatctggtgctgaaaacagccatcagcatcatcaccggcctggtcgcctgggcgatgctcgccgcactcgatgttcgcttcgcttttgtctggggattgctggcctttgcgcttaattacatcccgaatattggtagtgtcctcgcggcaatcccccctatcgctcaggtactggtgtttaatggcttctacgaagcgttgctggtgctggcgggatatctgctgattaatctggtcttcggcaatattctggagccgcgtatcatggggcgtgggctggggctttccacattggtggtatttttgagcttgattttttggggatggttgttaggaccggtgggtatgctgctttccgtgccgttgacaattattgtcaaaattgcgcttgaacaaacagcgggaggtcaaagcatcgccgttctgttaagcgatctcaataaagagtgacggcctcagcagaggccgtcagggttacagagctttcaggattgcatccacgctggctttggcgtcaccaaacagcatgtgggtgttttccttgaagaacagcgggttttgcacaccagcatagccagtgttcatgctacgtttaaagacaatcacgttctgcgctttccacacttccagcacaggcataccagcaatcggactcttcggatcatcctgcgccgccgggttaaccgtatcgttagcaccaatcaccagtacggtatcggtatcagcaaagtcatcattgatctcgtccatttccagcacgatgtcatacggtacttttgcttcagccagcaatacgttcatatgtccaggcaaacgccccgcgaccgggtggataccgaaacgcacattaataccacgagcgcgcaatttctcagtaatttcagcgacaggatattgcgcctgcgcgactgccatgccgtaccccggagtaatgatcacactatgggagtttttcagcagttccgctgtctcttctgcggtgatttcgcggtgctcacccacttcctgatcatcgccagtagaagagccgtcggtgccgaaaccacccgcaataacgctgataaaggaacggttcatcgccttacacataatgtaagaaaggatagccccgctagaaccgaccagcgcaccggtcacaatcagcaggtcgttgctgagcataaagcccgcagccgcagccgcccagccggagtagctgttcagcatgctcaccaccactggcatatctgcaccaccgatggaggcgactaaatgccagccgaataccagcgcaattgcggtcattatcagcaatgccagcacttgcaggccgacgctgtccgtgcgaacaaatacaatcagcagcaggaaggaaacgaccagagccgccaggttcattttgtgacggtttggcagcatcaatggtttagagctaatcttgccacacagtttgccgaacgccaccacgctacccgtgaacgttaccgccccgatgaagataccgaggaacacttccgtcaggtgaatattgaccagaatcggtgccattcccgcgtcatgatgcagatagctgttaaagccaaccagcactgccgccagacccacgaagctatgcaggatcgccaccagttctggcatttcggtcatttcaactttcttcgccagacggataccaattgccccaccaatgaccatcgccagcaagatccagccaacattacccgtatccggtccaaaaatggttgcgattaacgcaatcgccatcccggcgataccgaagttgttaccctggcgagacgtttcatgtttgctaagaccggccagactgaagataaacaggatcgcggcaacaatgtatgcagctgtaactaatcctccagacatatgttaccccttaatttttgcggaacattttcagcatgcgctgagtcacggtgaagccaccgaaaatattaatgctggctataagcaccgcgataaaactaaggaagctaacccagccgccctggccaatctgcaacagtgctccgacaacaataatcccactaatcgcgttggtgacgctcatcaacggtgtatgcagcgcgtggcttacattccacaccacgtaataaccgacaacgcaggccagcgcgaaaacggtgaagtgcccaaggaattctttcggcgcaacgcttgccatccagccaaaaagaatgattgccagcgccatcaacgcgtatttacgccacggactgcaggtacatttttcctcagttttcacttccggtgccgctttttgtgccgcctgcggctgagcacttacctgaatcggcggtgccggccaggtaatttcgcccgcacggatcacggtcacgccgcgaatcaccacatcatcaaaatcaacagtgatattgccgtctttctctttgcacaacagtttcagcagattaacgaggtttgtgccgtaaagctgactggattgcgtcggcagacggcccggaagatcggtataaccaatcactttgacaccattttccgtagtgaagatttcacccggcacggtgtattcacagttgccgccgttttgggctgccaggtcgacaatcacactgcccgccttcatggagtcaaccatttcacgggtaattagcttcggcgctggtttgcctggaataagcgcggtggtgacaatgatatcgacctcttttgcctgggcggcaaagagttccatttccgctttgatgaacgcgtcgctcatcactttggcatagccatcgccgctgccagcttcctctttaaaatccagctcgaggaattccgcgcccatactttgaacttgttctttcacttccgggcgggtgtcgaatgcacgcacaatcgcgccgagactgtttgctgcgccaatggcggccagacctgcaacacccgcaccaatcaccatcacttttgccggtggcactttcccggccgcagtaatttgcccggtaaagaagcgcccaaattcatgtgccgcttcaacaatggcgcgataaccggcgatgttcgccatgctgcttagtgcgtccaggctttgtgcgcgactgatacgcggcacagagtccatcgccatcacggtcacgttacgttccgcaagtttttgcattaattccggattctgcgcaggccagataaaactcaccagcgttgtcccaggattcagtaacgcaatttcatcatctaacggcgcattgaccttcagaatgatctcactctgccagacgctattcccttctacaatttcagcgcccgcttgcacaaacgctttatcgtcaaaacttgccagttgacccgcgccgctctctaccgcgacggtaaaacccagtttcagcagctgttccactgtttttggcgttgctgcaacacgggtttcattggttaaccgttctcttggtatgccaattcgcatgatattcccttccatcggttttattgatgatggtttgcctgtgtcaggagccacacaagctgctcatgtacgagctaaatgttactccgttaaaataaattagtaacaaacgccctataacgtactgaaaattatgcctgtgatctagcgccaaaaatcagtatttcggcgtgaactcgcaaaatattaacgattcagccgtgatagtgggataaacaccttagaacgccggataaagactgataattgtcttcgacggtcgggtaaaacgagacatcgccccggcacgaatcactacttaacattaaattaacttatacaattcagttgcttcagtagtaatgatgctgatacggctgttttttaagcatagacggtcatttgagcaggattaaaattggcttaaggaatgtgatatgaaaaatgacgcagacagttacaccgtttaaatgcaataatcagccacgtttctcgttaataacaataccagtacctggtttgcgcaaggcgaaggattatttttatgaagcttaagaacaccctcctggcgagcgcactgctttctgctatggcattctccgttaacgcagcaacagaactgacaccggagcaagcggcagcggttaaaccttttgaccgtatagtggttaccggtcgttttaatgctattggcgaagcggtgaaagccgtttctcgtcgcgcagataaagaaggtgccgcctctttttatgttgtcgacacttctgattttggtaacagcggtaactggcgtgtggtcgctgacctctataaagccgatgctgaaaaagcagaagaaacaagtaatcgcgtaattaacggtgttgtcgaactgccgaaagatcaggctgttctgattgaaccgtttgacacggtcaccgtccagggcttctatcgtagccagccagaagtcaatgatgccatcaccaaagcggcaaaagcgaaaggtgcctactctttctacatcgttcgtcaaatcgatgccaaccagggcggcaaccagcgtattactgcattcatctataaaaaagatgctaagaaacgtatcgtccagagcccggatgtgatcccggcagattccgaagcaggacgtgcagctctggctgccggtggcgaagccgcgaagaaagttgagatcccgggtgttgcgactaccgcaagtccaagttctgaagtcggtcgcttctttgaaacccagagtagtaaaggcgggcgttacaccgtcacgctcccggatggcactaaagtcgaagaactgaacaaagcgaccgcagcgatgatggtcccgttcgacagcatcaaattctctggcaactacggcaacatgaccgaagtctcctatcaggttgcgaaacgtgccgcgaagaaaggtgctaagtattaccacatcacccgccagtggcaggaacgtggtaataacctgaccgtcagcgcagatctgtataaataactattcagttactcctataaggcggcttgatgccgcctttcgcatttttagtcacaaatttccccgcgaccattgcatgcagacacatctcttcgtaaaatcccgcgcttcagtggcaaactccatttttatgcgttttgccctaatatttattcttcttatcacgttttaatcactggatatcgatggaaaagaaactgggactgagcgcactcaccgcgctggtattaagcagtatgctgggcgcgggtgttttcagtctgccgcaaaatatggcggcagttgccagcccggcagcactgctcatcggctggggtattactggcgctggcattttattgctggcctttgccatgctgatcctcacgcgcattcgtcccgaacttgacggcggtatctttacctatgcccgcgaagggtttggcgagctaatcggcttttgttccgcatggggatactggctgtgcgcagtcatcgccaacgtctcctatctggtgatcgttttttccgcgttaagcttttttacggacacgccggaattgcgcctgtttggcgatggtaatacctggcaaagcatagtcggtgcaagcgctttattgtggattgttcactttttgatcctgcgcggggtgcaaaccgctgccagcattaacctggtggcgacactggcaaaattgttgccgctgggtctgtttgttgtgctggcgatgatgatgttcaaactggataccttcaagctcgacttcaccggacttgcacttggcgtacccgtttgggaacaggtgaaaaacaccatgctgatcaccctgtgggttttcattggtgtggaaggtgccgtggttgtttctgcgcgtgcgcgtaataaacgtgatgttggcaaagcgacactgctggcggttctctccgctctgggcgtttacttgctggtaacgctgcttagcctgggtgtggtggcacgtcctgaactggctgaaattcgtaacccgagtatggccggtctgatggtggaaatgatgggaccatggggcgaaatcatcatcgctgccggtttgatcgtttccgtttgcggcgcgtacttaagctggaccatcatggcagcagaagtaccgttcctggccgccactcataaagcattcccgcgcatttttgcgcgccagaacgcacaagctgcgccatccgccagtctgtggttgaccaacatctgcgtgcaaatttgtctggtactcatctggctgaccggttccgattacaacacgttgctgaccatcgccagtgaaatgattctggtgccctatttcctggtcggcgcgttcttgctgaaaatcgcaacccgtccactgcataaagcggtaggtgtcggtgcctgcatttatggcttatggttattgtacgcctctggtccaatgcacttgctgttatccgttgttctgtatgcaccggggctgctggttttcctgtacgcgcgcaaaacgcatacccatgataatgtactgaaccgtcaggaaatggtgctgattggcatgctgttaattgccagtgttccggcgacctggatgctggtgggataacgttcatcccatcgttggatagcaaaggagataacgatgggtaaaacccagcccttgccaatattaattactggcggaggtcgtcgcatcggcctcgccctcgcatggcatttcattaatcaaaagcaaccggtgattgtcagctatcggacacactatccagccattgatggactgattaatgcaggtgcgcagtgtattcaggctgattttagcaccaacgacggtgtgatggcgtttgccgatgaagtactaaaaagcacccatggtctgcgtgctattttgcataacgccagtgcgtggatggcggaaaaaccgggtgcgccactggccgacgtactggcttgcatgatgcagatccacgttaataccccatacctgctcaaccatgcgctggaaagattactgcgtgggcacggacacgccgccagcgatatcattcactttaccgattatgtggtggagcgcggtagcgacaaacatattgcgtatgctgcaagcaaagcggcactggataatatgacccgcagctttgcccgcaagctggcaccggaagtgaaagtgaattctattgcgccaagcctgatcctgtttaatgaacatgatgatgccgaatatcgacaacaggcgctgaataaaagtctgatgaaaaccgcgcctggcgagaaagaagtgatcgacctggtcgattacttacttaccagttgctttgtcaccggacgcagtttcccacttgatggcggtcgtcatctgcgttaatgcagctttatccagcatataatcaacacccatgcgcttatcccccaacacgcaacagaaccaacaaaagcggcgggcaagcgcatcattccggtgaaataccacaggctcaccaggtaaacaaaatagggaataatgctccacatactaaaaatgatggttgcgcgtaaggcttcaatgccgcgttcgctggcaacaatataatgcgcgataagcgcaaaggtcgggaaaagtggaatcagcccggcgatataataatttttcgtttttgctaaaacaccaatcaacagcactaccagcgcaccgagcgcggctttgattaccagccccatctttttaccttaacacttccataacaagtcatcagtagaatacctgatgaaaacttgtttagaaacgattgatagtaagtaaaaacagcgcggtgtattgtgacgtttttatatctaccgtgaatgttatgaacactatcgtatttgtggaagatgatgcggaagtcggtagtctgattgccgcgtacctggcaaaacatgatatgcaggttaccgtagagccgcgcggcgaccaggccgaagaaaccattttgcgagaaaatccggatttggtgttactcgacatcatgctaccaggcaaggacggcatgaccatttgtcgtgatttacgcgcaaagtggtctggaccgattgttcttctaacctctctcgatagcgatatgaaccacatcctggcactggaaatgggtgcctgcgactatattctcaaaacgacgccccctgctgttttgctagcgcgtttacgtttgcatttgcgtcagaatgagcaagccacactgaccaaaggtcttcaggaaacgtctctgactccctacaaagccctgcatttcggcacgttgaccatcgatcccatcaaccgcgtagtcaccctggctaacactgaaatcagcctcagcacagctgatttcgaattattgtgggaattagctacccatgccgggcaaatcatggaccgcgatgcattgctgaaaaatttacgcggcgtcagttatgacggactggatcgtagcgtggacgtggctattagccggttaagaaaaaaactgctcgataacgccgcagaaccttatcgcattaaaactgtgcgtaacaaaggctatctttttgcgcctcatgcatgggaataagcgatgaaaaaactgtttatccagttttacctgttattgtttgtctgcttccttgtgatgtctctgctggttgggctggtgtacaaatttaccgccgaacgcgcgggcaaacagagcctggatgatttgatgaacagtagcctgtatctgatgcgcagcgaattgcgtgagatccccccacacgactggggtaaaactctgaaagagatggatttaaatctctctttcgatctgcgtgtcgagccactgagtaaataccatcttgatgatatttccatgcaccgactgcgtggcggcgaaattgtcgccctggacgatcagtacacgtttttgcagcgtatcccgcgcagccactacgtgctggcagttggtcctgttccttatctttattatctccatcagatgcgattgctggatatcgccctgatcgcttttattgctatttccctcgcctttccggtgtttatctggatgcgtccgcactggcaggatatgttaaaactggaagcagcggcgcaacgatttggcgatgggcatctcaatgaacgtatccactttgatgagggtagcagctttgaacgacttggcgtcgcatttaaccagatggcggacaatatcaacgccttaattgccagcaaaaaacagcttattgacggtatcgctcacgaactgcgaacaccgttagtgcgcctgcgttatcgactggagatgagcgataacctgagcgccgccgaatcccaggcgttgaatcgtgatatcagtcaacttgaagctttaattgaagagctgctgacttatgcccgactcgatcgcccacaaaacgagcttcatcttagcgaaccagacctgccgttgtggctgagtacgcatctggcagatattcaggcagtaacgcccgataaaacggtacggataaaaacgctcgtgcaaggccattatgcggcgttggatatgcgcttaatggagcgcgtgctggataatttgctcaataacgccctgcggtactgccatagtacggttgaaaccagcctgctactgagcgggaatagagcgacattaattgttgaggatgatggcccagggattgccccagaaaaccgcgaacatatctttgaaccttttgttcgcctcgatcccagccgggatcgcagtaccggcggctgcgggctggggctggcaattgtccactctatagcactggcaatgggcggtacggttaattgtgacaccagcgaactgggtggtgcccgcttcagctttagctggccgttatggcataacatcccgcaatttacctctgcctgacactacgcgcacgatggtcaagtcaccacgactgtgctataaaataagtatgttgtaactaaagtggttaatattatggcgcgttacgatctcgtagaccgactcaacactacctttcgccagatggaacaagagctggccatatttgccgctcatcttgagcaacacaagctattggttgcccgcgtgttctctttgccggaggtaaaaaaagaggatgagcataatccgcttaatcgtattgaggtaaaacaacatctcggcaacgacgcgcagagcctggcgttgcgtcatttccgccatttatttattcaacaacagtccgaaaatcgcagcagcaaggccgctgtccgtctgcctggcgtgttgtgttaccaggtcgataaccttagccaagcagcgttggtcagtcatattcagcacatcaataaactcaagaccacgttcgagcatatcgtcacggttgaaagtgaactccccaccgcggcacgttttgaatgggtgcatcgtcatttgccggggctgatcacccttaatgcttaccgcacgctcaccgttctgcacgaccccgccactttacgctttggttgggctaataaacatatcattaagaatttacatcgtgatgaagtcctggcacagctggaaaaaagcctgaaaagtccacgcagtgtcgcaccgtggacgcgcgaggagtggcaaagaaaactggagcgagagtatcaggatatcgctgccctgccacagaacgcgaagttaaaaatcaaacgtccggtgaaggtgcagccgattgcccgcgtctggtacaaaggagatcaaaaacaagtccaacacgcctgccctacaccactgattgcactgattaatcgggataatggcgcgggcgtgccggacgttggtgagttgttaaattacgatgccgacaatgtgcagcaccgttataaacctcaggcgcagccgcttcgtttgatcattccacggctgcacctgtatgttgcagattaacgcccggctttcatactgccgaccatctgttctggccgtacccagctgtcaaactcggcttcgctaagataccccagcgcaagggccgcagcttttaaggtcagcccttctttatgcgcttttttggcgatctcggcggctttgtcataaccaatgtgggtgttaagcgcagtcaccagcatcaggctttcattgagtaattgattgattcgctcacgattcggttcaatacccactgcgcagtgtttgttaaaactttccatgccatctgccagcaagcgcacgctttgcaggaaattgtggatcaccattggacggaagacgttcagttcaaagttaccggaagcgccccccatgttgatcgccacgtcgttccccatcacctgacagcagagcatggttaatgcctcacactgtgttgggttcactttccccggcatgatactgctgcccggctcattttccgggatactgatttcaccaattccgcagcgcgggccagaggccagccagcggacatcattggcgattttcatcagactcgcagccaaccctttcaacgcgccgtgcgcctgaaccagggcatcacaggtcgccagcgcttcaaatttgttcggcgcggtaacaaacggtgcacaggtaatgactgccagttcatctgctacgcgacgcgcatactccggatgggtatttagtccagtacccaccgctgtaccgccaagagccagttccgctacgtgaggcaggctgtattcgatatgtttgagattatgctcgagcatcgctacccagccggaaatctcctgccccagcgttaacggcgtggcatcctgcaagtgagtacgaccaattttgacgatatcggcaaaagcacgggatttctcattcagtgtctgtgtcagggttttaagctgaggaatgagttgcttgcgcagcgccagcagcgccgcaacgtgcatcgccgtcggaaagacatcgttggaactttggcttttgttcacgtcgtcgttagggtgaactttacgttccatcccgcgcacaccgccgagtaattcactggcccggttagccagcacttcgttcatgttcatgttactttgcgtgccggagccggtctgccagatagccagcgggaattcgtcgtcatgctgtcctgccagtacttcatccgccgcctgacgaatggcgctcgctttctcttcagacaacaagcctaaatcttcattaacttttgccgctgcacgcttggttagcgccagcgcatgaatcagactggtgggcattttctccgtgctaatgcggaaatgctccaggctgcgttgagtttgtgcgccccacagcttatctgccgggacatcaatcgcccccatgctatctttttcgctgcgtactgtattcatgacctgctcctcacctgattaattttttctttctgttttgctttcgttaagcaacttttagctcacttattatttaccatttgataacaaatgtttggtctttcgtgccatgtaaaaaaaccgccccgaagggcggctctgtttatttcacacagcgggtgcattgtgtgagttgtatctgctggaagaagtcatttcctttatcatccacaaggataaacgccgggaaatcttccacttcaattttccagatggcttccattcccagttccggatattcaacacattccaggctcttaatacttccctgcgccaatacagcggccggaccaccgatactgccaaggtagaagccgccgtgttttttacaggcatccgtcacctgctggctgcggttgcctttcgccagcatgatcatacttccgccctgcgcttgcagttgatcgacataagaatccatccgtccggcggtcgttgggccaagagaaccggaggcataaccttccggcgttttggccggacccgcgtagtaaatcggatgatctttgatgtactgcggcagcccttcaccgttatccatccgctctttcagtttggcgtgagcaatatcacgaccgacgataatcgtgccgttaaggcttaagcgtgtagaaacgggatactggctcaactgtgcgaggatctctttcatcggacggttaaggtcaacgcgcaccgcttcgccttctcccgctttgcgcagctcttccgggatatatttgcctggattatgttccagtttttcgatccagatcccctgacggttgatcttcgctttgatattacggtcagcagagcaggagacgcccataccgaccgggcaggatgcgccgtgacgtggcaggcgaatcacgcggatgtcgtgagcgaagtatttaccaccaaactgcgcacccagaccaagattttgcgcttcgatcagcaattctttttccagttccacatcgcggaacgcctgaccgtgctcattcccttccgttggcagttcatcatagtatttcgcggaagccagtttcaccgttttaaggttcgtttctgcagaagttccaccaataacgaacgcaatatgatacggaggacaggccgccgtacccagcgtgcgcatcttctcaaccaggtaatttttcagtttccccggcgtcagtaacgctttggtttcctgatagagatacgtcttgtttgcgctaccaccacctttggcgatacagaggaatttgtattcgtcgccatcaacggcataaagatcgatctgcgctggcagattggtgccggtattcacttctttatacatatccagcggcgcgttttggctgtagcgcagattatcttcgatataagtgttatagacaccgcgcgccagcgccgcttcatcaccaccaccggtccatacacgctgcccttttttaccaacaataatcgcggtgccggtatcctgacaggttggcagaacgcctttcgccgcgatgtcggagttacgcaggaattgcagcgccacatatttatcattttcgctggcctccgggtcacgcagaatgtcggccacctgttgttggtgcgccggacgcagcatgaagctcgcatcatgaaacgcctggcgcgccaacagagttaacgcttcgggtgcgactttcaaaatctcctgcccttcaaattcagatacgctaacgtgttcgctggttagcaggtaatactcagtatcatcttttttgagtggaaaaggagcctgataatgaaagggtttgttactcattgttctctcacttactgcctggtttggttatgctctgggcgggtgttccgttgccctgttaaaagcgagtaacaatatcctacacacttttttaacaaaaactgagactagtacgactttttgcggctccaggttacttcccgtaggattcttgctttaatagtgggattaatttccacattaaaacagggattgatcatgcaaaaactcattaacagtgtgcaaaactatgcctggggcagcaaaacggcgttgactgaactttatggtatggaaaatccgtccagccagccgatggccgagctgtggatgggcgcacatccgaaaagcagtagtcgagtgcagaatgccgccggagatatcgttagtctgcgtgatgtgattgagagtgataaaagcactctgctcggagaggccgttgccaaacgctttggcgaactgcctttcctgttcaaagtattatgcgcagcacagccactctccattcaggttcatccaaacaaacacaattctgaaatcggttttgccaaagaaaatgccgcaggtatcccgatggatgccgccgagcgtaactataaagatcctaaccacaagccggagctggtttttgcgctgacgcctttccttgcgatgaacgcgtttcgtgaattttccgagattgtctccctactccagccggtcgcaggtgcacatccggcgattgctcactttttacaacagcctgatgccgaacgtttaagcgaactgttcgccagcctgttgaatatgcagggtgaagaaaaatcccgcgcgctggcgattttaaaaagcgccctcgatagccagcagggtgaaccgtggcaaacgattcgtttaatttctgaattttacccggaagacagcggtctgttctccccgctattgctgaatgtggtgaaattgaaccctggcgaagcgatgttcctgttcgctgaaacaccgcacgcttacctgcaaggcgtggcgctggaagtgatggcaaactccgataacgtgctgcgtgcgggtctgacgcctaaatacattgatattccggaactggttgccaatgtgaaattcgaagccaaaccggctaaccagttgttgacccagccggtgaaacaaggtgcagaactggacttcccgattccagtggatgattttgccttcagcctgcatgaccttagtgataaagaaaccaccattagccagcagagtgccgccattttgttctgcgtcgaaggcgatgcaacgttgtggaaaggttctcagcagttacagcttaaaccgggtgaaagtgcgtttattgccgccaacgaaagtccggtgactgtcaaaggccacggccgtttagcgcgtgtttacaacaagctgtaagagcttactgaaaaaattaacatctcttgctaagcttattaaaggcttataacaccttcaggcggccagtccgcctgatttcattttatggataatcattatgaataaaagcctggtagcggtaggcgtcattgttgcgctaggcgtagtctggacaggcggcgcatggtatacaggcaagaagattgaaacccatctcgaagacatggtcgcgcaggcgaacgcgcaactcaaactgacagctcctgaatccaacctggaagtgagttatcaaaactatcatcgcggcgtattcagcagccagttgcaactgttggtgaaacccattgccgggaaagaaaatccgtggattaaaagcggtcagagcgtcatcttcaacgaaagcgttgatcatggtcccttcccgcttgcccagcttaaaaaactgaacctgatcccgagcatggcaagtattcaaaccacgctggttaataacgaagtaagcaaaccactgtttgatatggcaaaaggtgaaacgccttttgagattaacagccgcattggttacagcggtgattccagttccgatattagcctcaagccactgaattacgagcaaaaggatgaaaaagtcgcctttagcggcggcgagttccagttaaatgctgacagagacggcaaagccatctccctttccggggaggcgcaaagtggtcggatagacgcagttaacgaatacaaccagaaagtgcagttgacctttaataatctgaaaaccgacggttccagcacgctggcaagttttggtgagcgtgtaggaaatcaaaaactgagtctggaaaaaatgaccattagtgtggaaggcaaagaactggcactgctggaaggcatggagatcagcggtaaaagcgatctggtcaatgacggtaaaacgatcaatagccaactggattacagcctaaacagcctgaaggtacagaatcaggatctgggcagcggcaagctgactttaaaagtcggccagattgatggtgaagcctggcatcagtttagccagcaatataacgcgcaaactcaggcgctgctggcacagccagaaattgccaacaaccccgaactttatcaggagaaagtgacggaagccttctttagcgccctgccgctgatgctgaaaggcgatccggtgattactatcgcgccgctaagctggaaaaacagtcagggtgaaagtgccctgaatctgagcctgttcctgaaagatccggcaacgactaaagaagcgccgcaaacgctggcgcaggaagtagatcgtagcgttaaatctctggatgcgaaactgaccattccggtggatatggcaactgagtttatgactcaggtagcgaagctggaaggttatcaggaagatcaagcgaaaaaactggcgaaacagcaagttgaaggtgcaagtgcaatggggcagatgttccgtctgaccaccttgcaggacaataccatcaccaccagcctgcaatatgctaacggtcagataacgttaaatgggcagaaaatgagcttagaagattttgttggcatgtttgcgatgccagctcttaacgttccggctgtaccggcaattccgcagcagtaattcacggccaaaacgccggagaattttcactccggcgttttcatctgaaaacaaaccagagattgcctgatgcgctacgcttatcaggcctaccttttcctgcaacactttgaatttatgagtttttgtaggctggataaggcgtttacgccgcatccggcataaaaaacgcgcactttgtcaacaatctgaaacgccggagatttttctctccggcgttattttttacttcagcataaagtcatactgaatactcattttcacatcccagtaattcaggcgatcgcccagcgtactgccatcgcgcttttcccgccctttatcggcagcaagaaagaaattcatcccttgtaacggcccttcgctgacccgatagttcataccacctaagatacccgtgccttcaatccgcacatctcgtttactggattcatagccgcgagtcacaatcggtgcaaatgtcagcgtaaattgcggcgttaaacgatagttgacgcccaattgccaggactgcattccttcacggttacgatcaagacttaaactaaagggatagccaatgtcggtatccaccacggcaccattcattgcatggcgcaaataaccaccactgccaaatacacttccccacggcgcattccaggtcaattgtccactaaccaacgccgtttcattgggctggctggtattacgacttaaaccttcgagctgcgcgtaaaagccgagcaactcccctttcaacgtataattcgggtcgagcggtatgcttttctcgagaatactttgtatctgattggaaacatctttctgtacgcttgcccccagagaatagcgactggtatcatcatgccaactggcggctaaaaaagaacgtgcgcgatgtttatcgtattttcccgtctggctgttatacaccccttcatcacgaataccggttgtactatcagtccataaaaatactcgactacgccacattccccacagatcaatatttggtgttaaagcccaataacctaatgctccttcagaaactgtcggtaatgtacgttggctactgccagccattaacggaatacgataaggtaagctaccataactataatccgtcccgaagcgacctaatttaagcaggctattttcactgggttttatttttactgcccccagggcaaagccaaaacttttatcaccatcaagataccaccgggtactcatatcagcacgagcacctaatttataaacataatacgccccgccttcaacgccaataatattggaataataaccactattgaaatcgagcaatcctccctgtacccatgcgtaaatatctcttcccgcgccagcactgggcttatccgccctgcgcaattcgtttttcagtctgatgcgtagtcccgcttcatcgtcagccagttgcgccgcataagcagaggtaaggccagaggcagccgtcaggcaaataacggccatggccactatttttctcatagttgcacctttgatgttctgattatttttattgaatattaattagtgatatcgctgattaattgctgctgcacttttttacgattatcaatttcaaccacgatttctttgaattttttatccgtgagcggataaaaccagataataacgaatgccagtagcataaatccgcaaggtactaaggcaatacttgtgcggatgcccataataacttccggcgtttgcacctgattggcgatatatccgcttaaccccaaaataaaggcaggaatactacctccgattgcctgaccgcatttacgggtaaaactgaatagactataggtgagcccttcaattcgcacgccggtcaggtattcaccgtattctacggtatcagcttccagcgcccacatcacggtcatggtaacgccctgaccaatactagcgatggccaacgcaaccaacgccaccggcagactccagacggaaacccagaagaacagcagataaccgcaggttcccagcaaagcgccaatcaggaaggtattctttttaccgatcctcgcgaccatccccggcaccagcggtgcgcttgccacagtaccaaccaggttttgcaccagtaccagcacagtgaacagcccggtatcatttaacacatagcgcacgtagaacaagctgctggcgctgaccgcaaaggtgctaatcagcacacacagcgcaccgatgcacaacataaacagcgggcgattccgtttcagggtttgcagactgatattcaaactcggctgcgcaacgatacgtaccacattctcacgcgtgcttttgaagcagatgaagtaaagcaccattccggcaatcgccagcacaattgtccagaaatggtatacgctcaccatctcttccgggctggagttcttaatgctcggtcctatcagaaatgccaggcagacaaaggtcaaactagcggcaatcccacgagccgcgcccagacgggcgcgggattgtggttgttgggtcatcgcggtagcaagactaccataaggaatattcaccaggctgtagcaaagcccgaggcccatgtaggtcaaatatgcatacaccactttgctaccatggctccagtcggtcagcacccagaataccagcacgctgaagatcattaacggcgcagtaccgaagagtaaaaacgggcggaattttccccagcgggtattcacactgtccaccactcgtccggcaaagacgtcggcgaaggcatcgaatacccgcaccagtaacagcatggtgcccgccgcagcggcaccgacgccagcgacgtcggtgtagtaactcaacaggaagagcgcccccattgcgaaggcgaagttattggcgacgtcaccgaggctgtagccgacgatggtgcgccaggagagttgttgattcattgtttgcctccctgctgcggtttttcaccgaagttcatgccagtccagcgtttttgcagcagaaaagccgcgctcttcggtttgcggtcgcgagtgaagatccctttcttgttaccgccaacgcgcaatatgccttggctggtcgcaaaatcggcgaaattccatacctgttcaccgacgacggcgctgacgcgatcaaagacgcggtgatacatatccagccatgcacactgatactcttcactccacatgtcggtgtacatactgtgcagcccggctaacgtatccacgccgtattcggtgatgataatcggctgatgcagtttctcctgccaggccagaagttctttttccagtaccttctctgccgtttccaaatcgccgctttggacataccatccgtaataacggttcaggcacagcacatcaaagagatcgctgatggtatcggtgtgagcgtcgcagaacattacattgacgcaggtgatcggacgcgtcgggtcgagtttacgcgttgcttccgccagtggcgcgaaatattcccgtgcaccttgcggacgggtatccggttcgttggcaatactccacatcaccacgcttgggtggtttttgtcacgcgctatcagctctttaatcgcctgtaagtgcgcttgctgagtttccccgttgactgcctcttcgctgtacagttctttcggcttgttgcccgcttcgaaaccaatgcctaaagagaggttaaagccgacagcagcagtttcatcaatcaccacgatgccatgttcatctgcccagtcgagcatctcttcagcgtaagggtaatggctggtacggtaggagttggccccaatccagtccattaatgcgtggtcgtgcaccatcagcacgttatcgaatcctttgccacgcaagtccgcatcttcatgacgaccaaagccagtaaagtagaacggtttgtggttaatcaggaactgttcgcccttcactgccacactccggatgccgacgcgaagcgggtagatatcacactctgtctggcttttggctgtgacgcacagttcatagagataaccttcacccggttgccagaggtgcggattcaccacttgcaaagtcccgctagtgccttgtccagttgcaaccacctgttgatccgcatcacgcagttcaacgctgacatcaccattggccaccacctgccagtcaacagacgcgtggttacagtcttgcgcgacatgcgtcaccacggtgatatcgtccacccaggtgttcggcgtggtgtagagcattacgctgcgatggatcccggcatagttaaagaaatcatggaagtaagactgctttttcttgccgttttcgtcggtaatcaccattcccggcgggatagtctgccagttcagttcgttgttcacacaaacggtgatacgtacacttttcccggcaataacatacggcgtgacatcggcttcaaatggcgtatagccgccctgatgctccatcacttcctgattattgacccacactttgccgtaatgagtgaccgcatcgaaacgcagcacgatacgctggcctgcccaacctttcggtataaagacttcgcgctgataccagacgttgcccgcataattacgaatatctgcatcggcgaactgatcgttaaaactgcctggcacagcaattgcccggctttcttgtaacgcgctttcccaccaacgctgatcaattccacagttttcgcgatccagactgaatgcccacaggccgtcgagttttttgatttcacgggttggggtttctacaggacgtaacataagggactcctcattaagataataatactggtcaacctttaatctgattagttaaccaattctgtgttgcacacagttatctgtgagaaacccatggaagagaaatggaaataaaaagaactgacaccgcgatcaaaaaaccaaaaactgcaatacccacagcgtgatatagatcgcattaatctttaaaacagcgttgacagaagccataaaataagcaaccgaacgttcgttcgagcgtattgggaacgataaactctcatgacatatggctacagtgaatattttggggggaattctccgaagccgggaaggataatttttgcacagagaaattacgatatgaaacgcgggcacagttatcaccagcccgccgaaaaagagagagaatcaggatgcggttaagataccgccaatcatcgcgcgtaatccctgagcaaagctcgcttcacgcgccaggtcttccgcttcgatatcggccagtacaccgtaggtcagatccagcagtaaacgactagtcattgccgtgttgatgtctgggcttatctcgcctttttgctgggcatcacgcatccgctgggcaacaaattccgtgatcgtcatatgcttatttttaagcatggcggcgacctgtgggttacgcatcccttccgccataatttcaaccaccagcgcccgttgtccaaaggcttcatgggtgagagagacaatggactcgaccatatagtcaacgaaatgaatcccttcaatcggttcccggaaacgggccagcgccctctcctggtcctgtaagataatcgcctgaatcaaggcttctttggagatgaaatggtgatagagcgtcccgggactaatggcgcaagatttacagatggctttcatgctggcactgtgaaatccattttcactaaaaatctctctggcagcattgaggatccgggtccgtgtcggttgtgcttcagtctgcatgttatccatcattaaaccattatagttagcgtgaataactagtttaccgcgttgtcaggtgagcgcctatcattgctgttgaatagtgcgaaggcacactctattcgtatacttttcactctgaaattggttaaccaatagccgtgatttggctgccagttatttagcagagacgttgatgagtttatcccggtaaacaacacgcacggttgtttaccggtccgttagtgtattaattgagctcctgtaccccaccaccggagacggtgagaatttgtccgcttacccagctcgcagcagggctgcaaaggaacagcgctgcgttagcaatatcttgcggttggcccagacgtctgatcggcgtgtgctgtaacattttttgttcaatttctggtgtaataacggatttcagggcatcggttaatattgcccccggcgcaatgccatttacccgaatatttttttcacccaggtcaaacgccatatttctgaccagatgactggccgcagctttagaacttgcataggaagtcatgtttatatttttattttctgccgccatagaagtgatggtcagaataacgccaccgccatttttttccatttctggcgcaacaagttgactcagatggaaaaaagaaaacacattcagttcataagcacggcgaaaatccgccattggcatatcaaacggtttaggtccaccgccaccggcgttgttaaccagaatatcaactttacccagcttactgatagcaaagtctgccagtgcagagagttcctgttcggaagtaatatcacaacggcaggcaaatgcctgaccacccagttgttgaatttcgtctacaacatggttagctgcgtcggcgttaatatcactgaccaccacagatgcgccagctgtcgcgaatgtaatggcgatttctttaccaatacctgcacccgcacctgtgatgatggcgcattttccgtcgagtctcaggttgtcagaattaaacacataaacctcctgtgaacttcagtaaaaataaaaggcaccgcctgtgtgccacattttttatcattaaccttgaggaaaggacactaccaggtatagcagataaagagaggattatttcgctgcaatgagccgggcgggaataataagattgcgactatgcgtctcttcatgggtgattttttgcatcatgcgatccgcaagtgtgataccaagttcccgcgctggcgtgctggcccaggtaacaggtatatcatcaagtgtggttggtgtcgcatcggtaaatgccgccaggctaacctgttgctcaaagtaacgatcgactccgctttccccgctttgccgccctgctttgagcaaaccaaaccatgcccccatcgcaatagtttcgttatagcaaaccacggcactgatggtcgggttatgacgtaaaagcgccgtgatagcttccgcggcttgcttctggctggaagtgcactccaacacccaatcgctatgaaacggcaggccaaattttagtagagttgcacaatagcccccaacccgttctgcacgggttaaactggaactttgccctcccagccaggcgatccgctgatgcccattgcgaatgagatgctccgtcaacaactgtgcagcctgcatgttgtccgggcgaaccgtatcaacatcatcaagataactggcacgggaagcgaaaatcaccgggatagctttttcttctgccatccgtcgcaggtcatcgctacttcctgcagctccggcaattaccacaccatcgacaccctgattcagtaacagactaaaccgctgtgccagctgctcaccgtctttaccgccgtgaagcaaaaaaaccatccgtccctgcgcttccagagcttccgtcaatccggccgtcaattcggcgtaaaacggcgcagataaatcacggacgatcaaaccaatgacgccgctttgcccgccgcgcagcgcgctcgcctggcgattgcgcacaaatcccagctcttcaatggcggcgttaacgcgttctcctgtggcggtagagattcgccctttgccactaagcaccaggctaacggtacttacgctcacgcccgcagccagcgcaacatcatgaatggttatttttttggcggtagccatgcagatgacctactccctgattatgtgacagataaaacgttttaccttttatttatcttatacccgctattatcgttgcgtaatgtgatttatgcctcactaaaatttgataaaacgttttatcttctcgcgcaatttactgaatccagattgttctctacgaggagtcgttttatgacggcgaaaacagcaccgaaagtcacgctgtgggagttcttccagcagttaggcaaaaccttcatgttacccgtggcattattgagcttctgcggcattatgctcggcattggtagttctcttagcagccatgatgtcataaccctgatcccggtcctgggcaaccccgtgttgcaggctatctttacctggatgagtaagattggcagctttgcttttagtttcctgcctgtcatgttctgtatcgccatcccgctgggcctggcacgcgaaaataaaggcgtagcggcattcgctggcttcatcggttatgcggtaatgaacctcgcggtaaacttctggttgaccaataaaggcattctgccaaccacggatgccgcggttctgaaagccaataacatccagagcattcttgggatccagagcatcgataccgggatcctcggtgcggtgatcgccggtattatcgtctggatgctgcatgagcgtttccataatatccgcctgccggatgcgctggcattcttcggcggtacgcgcttcgtaccaattatctccagcctggtgatgggccttgtcggcctggtgattccattagtctggccgattttcgccatgggtattagcggcttgggccatatgataaacagcgcgggtgatttcggaccgatgctgtttggtaccggtgaacgtctgctgttgccgtttggtctgcatcacattctggtggcattaattcgctttaccgacgcaggcggcacgcaggaagtctgcggtcaaaccgtcagcggcgcactgaccatcttccaggcgcaattgagttgcccgaccactcacggtttttctgaaagcgccacgcgtttccttagccaaggtaaaatgcctgcgtttctcggcggtctgccaggtgcagcgttagctatgtatcactgcgcgcgcccggaaaatcgccataaaattaaaggtctgctgatttctggcctgatcgcctgcgtcgttggcggcactaccgaaccgctggaattcctgttcctgttcgtagcgccagttctgtatgtcatccacgcgctgttaaccggcctcggcttcaccgtcatgtctgtgctcggcgtcaccatcggtaataccgacggcaatatcatcgacttcgtggtgttcggtattttgcatggtctgagtaccaagtggtacatggtgccagtggtggcggcaatctggtttgtcgtttactacgtcatcttccgtttcgctatcacccgcttcaatctgaaaaccccggggcgcgatagcgaagttgccagcagtatcgaaaaagccgttgccggtgcgccgggtaaaagtggttacaacgttcctgcaatcctcgaagcattaggcggtgccgacaatattgtcagcctcgataactgcattacccgtctgcgtttgtctgtgaaagatatgagccttgttaatgtgcaggcactgaaggacaatcgggcaattggcgtagtacaacttaatcaacataacctgcaggttgttatcgggccacaagttcagagtgtaaaagatgaaatggccggtctgatgcatactgtccaggcataaggataagatatgttcgattttagtaaggtcgtggatcgtcatggcacatggtgtacacagtgggattatgtcgctgaccgtttcggcactgctgacctgttaccgttcacgattagtgacatggattttgccactgccccctgcattatcgaggcgctgaatcagcgcctgatgcacggcgtatttggctacagccgctggaaaaacgatgagtttctcgcggctattgcccactggttttccacccagcattacaccgccatcgattctcagacggtggtgtatggcccttctgtcatctatatggttagtaaactgattcgtcagtggtctgaaacaggtgaaggcgtggtgatccacacacccgcctatgacgcattttacaaggccattgaaggtaaccagcgcacagtaatgcccgttgctttagagaagcaggctgatggttggttttgcgatatgggcaagttggaagccgtgttggcgaaaccagaatgtaaaattatgctcctgtgtagcccacagaatcctaccgggaaagtgtggacgtgcgatgagctggagatcatggctgacctgtgcgagcgtcatggtgtgcgggttatttccgatgaaatccatatggatatggtttggggcgagcagccgcatattccctggagtaatgtggctcgcggagactgggcgttgctaacgagcggcagcaaaagtttcaatattcccgccctgaccggtgcttacgggattatagaaaatagcagtagccgcgatgcctatttaagcgcactgaaaggccgtgatgggctttcttcccctagcgtactggcgttaactgcccatatcgccgcctatcagcaaggcgcgccgtggctggatgccttacgcatctatctgaaagataacctgacgtatatcgcagataaaatgaacgccgcgtttcctgaactcaactggcagatcccacaatccacttatctggcatggcttgatttacgtccgttgaatattgacgacaacgcgttgcaaaaagcacttatcgaacaagaaaaagtcgcgatcatgccggggtatacctacggtgaagaaggtcgtggttttgtccgtctcaatgccggctgcccacgtagcaaactggaaaaaggtgtggctggattaattaacgccatccgcgctgttcgttaaccccaattgcgcaacgtaaaaaatcgttgcgcaatcgtggatttttaccctgctttgtttttataatggtgcgcacttttatatccagaaaaagagtgcgaccatgattgataccaccctgccattaactgatatccatcgccaccttgatggcaacattcgtccccagaccattcttgaacttggccgccagtataatatcagccttcctgcacaatccctggaaacactgattccccacgttcaggtcattgccaacgaacccgatctggtgagctttctgaccaaacttgactggggcgttaaagttctcgcctctcttgatgcctgtcgccgcgtggcatttgaaaacattgaagatgcagcccgtcacggcctgcactatgtcgagctgcgttttagtccaggctacatggcaatggcacatcagctgcctgtagcgggtgttgtcgaagcggtgatcgatggcgtacgtgaaggttgccgcacctttggtgtgcaggcgaagcttatcggcattatgagccggaccttcggcgaagccgcctgtcagcaagagctggaggcctttttagcccaccgtgaccagattaccgcacttgatttagccggtgatgaacttggtttcccgggaagtctgttcctttctcacttcaaccgcgcgcgtgatgcgggctggcatattaccgtccatgcaggcgaagctgccgggccggaaagcatctggcaggcgattcgtgaactgggtgcggagcgtattggacatggcgtaaaagccattgaagatcgggcgctgatggattttctcgccgagcaacaaattggtattgaatcctgtctgacctccaatattcagaccagcaccgtagcagagctggctgcacatccgctgaaaacgttccttgagcatggcattcgtgccagcattaacactgacgatcccggcgtacagggagtggatatcattcacgaatataccgttgccgcgccagctgctgggttatcccgcgagcaaatccgccaggcacagattaatggtctggaaatggctttcctcagcgctgaggaaaaacgcgcactgcgagaaaaagtcgccgcgaagtaacaaaatggatggtgcaaatgcaccatccatttttcatgcaaggcacaaagtcgcgcgatgtttggcggattcgatgcccagctcaatcaactccattacctggattgcctggcttgccggaaccggattttcaccatcgccatttaacgcatcacgaatagccgcatagtaagccggataattcccaggcaccgtcaacagcgtttcttcgacacgttcctcaccttccacgcgggtaagtacgccatcacgcatatcgtagccccagtcttcctgcggtagacgctcgccatttttcagacgttcttcctgtggatcgaggccatatttcacataactgcctcgggatccatgcacgatataccgtgcactctcagcggctgccagcatggtaccgtgtaaaatgactcgccgctgtggataggacaagatggcgtggaaataatcggtgctctgcgctccgggccgtaactgtgccaaatctaccgtcatgctgaccggtaaaccaaaaagcgtaatggcctgatcaagaagatgtggtgctaaatcgtaccagataccgctgcctgggccgccctgttcacgccaacgatcgcgcacctgcggacggaagcggtcaaaatgagactcaaagtaagcaacttcacccagcacgccttccgcgagtaaaccttttagcgtcaagaaatcgctatcccagcgacggttatggaatacagacagcacacgccccaggctttttgccagcgcatccagctctcgcgcttgactcagtgtcacggtaaagggtttatcaacgaccacatgtttacccgcctcaagcgccgctttggctaacgggaaatgggtatcgttgggtgtaggaatgacaatcaggtctatgttgggatcgttaaacagatgcttcggctcagagacaaccgtaaccgttggccagtcggcttttacttttgtttcatcactgctggagattaccgccagttcctgcccgggcgtgcccgcaatcaggggcgcatggaaggttttgctcgcataaccatacccaatcaacccaacacggatgttgtcgctcatgtcattgcctctcattgaagtatgatggctatttgacactatcctttacccacgctcaacagtttaataacctgccagcaataagggatgttgtttaacttaagtcaaaaaaatagcgaattttccaacgacaaaagctaaatatcgcaaaaacctcagtaaaaatcttgctggagctattattgctaagtaacatttaccccctgaagttaatggatcaatcaagagagatgtgggctgtaatgaatcgtcttattgaattaacaggttggatcgttcttgtcgttagtgtcattcttcttggcgtggcgagtcacattgacaactatcagccacctgaacagagtgctagcgtacaacacaagtaagctctgcacttgtggagcgacatgctgcccgtccgggtgcatgttttcacttgtcggatattaaaccaggaatttattatcttgttcgatgttgttggtgattgtcagggatagtaaagcgcgttactcttttcagagcagtttttcatccctgaatatttgccatcagcgcattcttattattgtaataacacaagcgttcacttttggtgaaattttatcatcactaataatacctacccctttggtattaattattttatggaccttttatgactgttcaggactacttattaaaatttcgcaaaatcagtagtctcgaaagtctggaaaaactctacgaccatcttaattacaccctgacggacgatcaggaactgatcaatatgtatcgtgctgccgatcaccgtcgcgcagagctggtttctggcgggcgtttgtttgacctcggccaggtaccgaagtccgtctggcactatgtccaataaagaaagtagcgatcggttataaaagccttataataacgcccctaaaattagatttgcctgtttgcgtcgctattctggagaacctatgaccaccacaacgccacaacgtattggaggctggttgcttggcccgttggcctggcttttagtcgctctgttgagtacgacgctggcgttgttgctgtataccgctgcgttatcttctccgcaaacatttcaaacgctcggcggacaagcactgacgacacaaatcttatggggcgtttcttttattaccgctatcgccttgtggtattacacactgtggttgaccatcgctttctttaaacgtcggcgttgtgttcctaaacactatattatctggctgcttatttccgtattgctggcagtaaaagcattcgcttttagtcccgtggaagatggcatagccgttcgccagttgctgtttactttgttggcaaccgcattgatcgtcccctatttcaaacgcagcagccgggtaaaagcgacgtttgtgaatccgtaataaccttacagttaacctgttgtcgcctgctctggattaacggataataggcggcttttttatttcaggccgaaaaatgactgactacctgttactgtttgtcggaactgtactggtcaataactttgtactggtcaagtttctcggtctctgtccgtttatgggggtttccaaaaaactggaaaccgcgatgggcatggggctggcaacaacgtttgtgatgacgctggcgtctatttgcgcctggcttatcgatacgtggattttgatcccacttaatctgatttacctgcgcaccctggcatttattctggtgattgctgtggtcgtgcagttcaccgagatggtggtgcgcaaaaccagcccggtgctttaccgtctgctggggatttttttgccgcttatcaccaccaactgtgcagtgctcggcgtggcgttgctgaatatcaatctcgggcacaatttcttgcagagcgcgctgtacggtttttccgccgctgtcggtttcagcctggtgatggtgctcttcgccgccatccgcgaacgccttgctgtggctgatgtcccggcaccttttcgcggtaatgccattgcgttaattaccgcaggtcttatgtctctggcctttatgggctttagtggtttggtgaagttgtaatgaatgctatctggattgccgttgccgccgtgagcctgctgggcctggcgtttggcgccattctgggttatgcctcccgccgttttgcggtggaagacgatccggtcgttgagaaaattgacgaaatcttaccgcagagccagtgtggtcagtgcggttatcccggctgtcgcccctacgcggaagccatcagctgtaacggtgaaaaaatcaaccgttgcgccccaggtggcgaagctgtgatgctaaaaattgccgagttgcttaatgtcgagccgcagccgctggatggcgaagcgcaagagataacgcctgcgcggatggtggcggttattgatgaaaataactgtattggctgcactaaatgtattcaggcgtgtccggtagacgccatcgttggcgctacccgtgccatgcatacggtaatgagtgatctctgtacgggctgcaatttatgtgttgatccgtgcccgacgcactgcatcagcttgcaaccggtcgcagaaacacctgactcctggaaatgggatctgaacaccattcccgtgcgtatcattcccgtggaacaccatgcttaagttattctctgcattcagaaaaaataaaatctgggatttcaacggcggcatccatccaccggagatgaaaacccagtccaacggtacacccctgcgccaggtacccctggcgcagcgttttgttattccactgaaacagcatattggcgctgaaggtgagttgtgcgttagcgtcggcgataaagtattgcgcggccagccgcttacccgtggtcgcggcaaaatgctgcctgttcacgcgcccaccagcggtaccgttacggctattgcgccccactctacggctcatcctagtgctttagctgaattaagcgtgattattgatgccgatggtgaagactgctggatcccgcgcgacggctgggccgattatcgcactcgcagtcgcgaagagttaatcgagcgcatacatcagtttggtgttgccgggctgggcggtgcaggattcccgacaggcgttaaattgcagggtggcggagataagattgaaacgttgattatcaacgcggctgagtgcgagccgtacattaccgccgatgaccgtttgatgcaggattgcgcggctcaggtcgtagagggtattcgcattcttgcgcatattctgcagccacgcgaaattcttatcggcattgaagataacaaaccgcaggcgatttccatgctgcgcgcggtgctggcggactctaacgatatttctctgcgggtgattccaaccaaatatccttctggcggtgctaaacaattaacctacattctgaccgggaagcaggttccacatggcgggcgtagttccgatatcggcgtattaatgcaaaacgtcggcactgcttatgcagtgaaacgtgccgttattgatggcgagccgattaccgagcgtgttgtaaccctgactggcgaagcaatcgctcgcccgggcaacgtctgggcacggctggggacgccagtgcgtcatttattgaatgatgccggattctgcccctctgccgatcaaatggtgattatgggtggcccgctaatgggctttaccttgccatggctggatgtcccggtcgtaaagattaccaactgtctgttggctccctctgccaatgaacttggcgaaccacaggaagaacaaagctgcatccggtgtagcgcctgtgctgacgcctgccctgcggatcttttgccgcaacagttgtactggttcagcaaaggtcagcaacacgataaagctaccacgcataacattgctgattgcattgaatgtggggcttgcgcgtgggtttgcccgagcaatattcccctggtgcaatatttccgtcaggaaaaagctgaaattgcggctattcgtcaggaagaaaagcgcgccgcagaagccaaagcgcgtttcgaagcgcgccaggctcgtctggagcgcgaaaaagcggctcgccttgaacgacataagagcgcagccgttcaacctgcagccaaagataaagatgcgattgctgccgctctggcgcgggtgaaagagaaacaggcccaggctacacagcctattgtgattaaagcgggcgaacgcccggataacagtgcaattattgcagcacgggaagcccgtaaagcgcaagccagagcgaaacaggcagaactgcagcaaactaacgacgcagcaaccgttgctgatccacgtaaaactgccgttgaagcagctatcgcccgcgccaaagcgcgcaagctggaacagcaacaggctaatgcggaaccagaacaacaggtcgatccgcgcaaagccgccgtcgaagccgctattgcccgtgccaaagcgcgcaagctggaacagcaacaggctaatgcggaaccagaagaacaggtcgatccgcgcaaagccgccgtcgaagccgctattgcccgtgccaaagcacgcaagctggaacagcaacaggctaatgccgagccagaacaacaggtcgatccgcgcaaagccgccgtcgaagccgctattgcccgagccaaagcgcgcaaacgggaacagcaaccggctaatgcggagccagaagaacaggttgatccgcgcaaagctgccgtcgaagcggctattgcacgcgccaaagcacgcaagctggaacagcaacaggctaatgcggtaccagaagaacaggttgatccgcgcaaagcggcagttgccgcggctattgcccgcgctcaggccaaaaaagccgcccagcagaaggttgtaaacgaggactaaatggtattcagaatagctagctccccttatacccataaccagcgccagacaagccgcattatgctgttggtgttgctcgcagccgtgccaggaatcgcagcgcaactgtggttttttggttggggtactctcgttcagatcctgttggcaagcgttagtgctctgttagccgaagctctcgtactcaaactacgcaagcagagcgtagccgcagcgttgaaagataacagtgcattgctgacaggcttattgctggcggtaagtattccccccctcgcgccatggtggatggtcgtgctgggtacggtgtttgcggtgatcatcgctaaacagttgtatggcggtctgggacaaaacccgtttaatccggcaatgattggttatgtggtcttactgatctccttccccgtgcagatgaccagctggttaccgccacatgaaattgcggtcaacatccctggttttatcgacgccatccaggttatttttagcggtcataccgccagtggtggtgatatgaacacactacgcttaggtattgatggcattagtcaggcgacaccgctggatacatttaaaacctctgtccgtgccggtcatagcgttgaacagattatgcaatatccgatctacagcggtattctggcgggcgctggttggcaatgggtaaatctcgcctggctggctggcggcgtatggttgctatggcagaaagcgattcgctggcatattcccctcagcttcttagtaacgctggcgttatgcgcaatgttgggctggttgttcagtccagaaacactggcagcaccgcaaattcatctgctgtctggagcgaccatgctcggcgcattctttattttgactgacccggttaccgcttctacgaccaatcgtggtcgtcttattttcggcgcgcttgcgggcttattagtctggttgatccgcagtttcggcggctatcctgacggcgtggcttttgccgtcctgctggcgaacatcacggttcctctgatcgattactacacgcgtccgcgcgtctacggccatcgcaaagggtaaaccatgctgaaaactatccgaaaacacggcattacgttggcgctatttgcagcgggtagtacagggttaactgcggccatcaaccagatgaccaaaacgacgattgctgaacaggccagtctgcaacaaaaggcgttatttgatcaggtgctgccagccgaacgctataacaatgcgctggcacagagttgctatctggtaactgcgccagagttaggtaaaggtgagcatcgggtttacatcgccaaacaggatgacaaaccggcagccgccgttctggaagcaaccgcgccagatggctattccggtgcgattcagctgctggtgggagccgattttaacggcacggtacttggcacgcgcgtgacagagcaccacgaaacgccagggcttggcgataaaatcgaactgcgcctttctgactggatcacccattttgcgggtaaaaaaatcagtggtgcagatgatgcgcactgggcggtgaagaaagatggtggtgatttcgaccagttcaccggcgcgacgattactccccgcgcggtggttaatgcggtaaaacgcgccggattgtacgctcagacgttaccggcacaactttctcaacttcctgcctgtggagaataaagcgtgagcgaaattaaagacgttattgttcaggggttgtggaaaaacaactctgcgctggtccagttgctcggcctttgtcctctgttggcggtcacgtccactgccactaacgctctgggtttaggacttgcgactacgctggtactgacgctgaccaacctgaccattagcacgctgcgtcactggacgccagccgagatccgcattcccatttacgtgatgatcatcgccagcgtggtcagcgctgtacagatgctgatcaacgcctacgcctttggcctgtatcaaagtttagggatttttattccgctgattgtcactaactgtatcgttgtgggccgcgctgaagccttcgccgccaaaaaaggtccggcgcttagcgcactggacggctttagtattggtatgggcgcaacctgcgccatgttcgtgctgggtagtctacgcgaaattatcggcaatggcacattgtttgacggtgcagatgcgctgttaggtagctgggcaaaagtattacgcgtggagattttccacaccgactcccctttcctgctggcgatgctgccaccaggtgcatttattggcctgggactgatgctggcaggaaaatacctgattgatgaaagaatgaaaaagcgccgtgctgaagcagctgcagaacgtgcattgccaaacggtgaaacagggaatgtctgatgaataaagcaaaacgcctggagatcctcactcgcctgcgtgagaacaatcctcatcccaccaccgagcttaatttcagtagcccttttgaattgctgattgccgtactgctttccgctcaggcgaccgatgtcagtgttaataaggcgacggcgaaactctacccggtggcgaatacgcctgcagcgatgcttgaactgggcgttgaaggggtgaaaacctatatcaaaacgattgggctttataacagcaaagcagaaaatatcatcaaaacctgccgtatcttgctggagcagcataatggcgaggttccggaagatcgtgctgcgcttgaagccctgcccggcgtaggtcgtaaaacagccaacgtcgtattaaacactgcattcggctggccgactattgctgtcgacacgcacattttccgcgtttgtaatcgtactcaatttgcgccggggaaaaacgtcgaacaggtagaagaaaagctactgaaagtggttccagcagagtttaaagtcgactgccaccattggttgatcctgcacgggcgttatacctgcattgcccgcaagccccgctgtggctcttgtattattgaagatctttgtgaatacaaagagaaagttgacatctgaagaaaaggggtaacaccgattaccccattgataacctttctttatcctcttttaaaacatctttttaacgtcaatgatgccattgcttagcgttatcatcaggtaatccgtttgcggataaccaaaaatgcaggttaattgtttttttaatagcgaaattttctattcattcgtgatcaagatcacgatgctgtcgcaatgtaaaaacattgcaagaatcaggttaaatcatttaaatttacacacgcaacaaatattgacctacaaaacattacactggctatttttcagaaactggactatctcactagtaaaaacgctaaatagcagaacatatcgccgttaagccatcacccccctctcagtgcagtgaaaaaatctgccgttacgttttttgaaaaatttaacgctggataacatttcccggaatggttgaattccccgcctcagttatatgtaacagattattacaaaggacttgtctgaaagtgcaagatagtgaacattacctgccgtttcccctcccactataacaattgcgcgtatgttttttatacataacgcgagaaagcacccccgttaatatgggatgtaaaaaaagaggtaaaagtgtccactgcaaaccaaaaaccaactgaaagcgtcagtttgaacgctttcaaacaaccgaaggcgttctatctcatcttcagcattgagttatgggaacgttttggttattacggcctacaaggaattatggctgtttacctggttaaacaactgggtatgtctgaagcggatagtatcacccttttctcttcctttagtgccctggtttatggtctggtcgctatcggcggctggttaggtgacaaggtactgggtactaaacgcgtaattatgctcggcgctattgtgctggcgattggttatgctctggttgcctggtctggtcacgacgccggtatcgtttatatgggtatggcggctattgcggtcggtaacggcctgtttaaagctaacccgtcttctctgctttctacatgctatgagaaaaacgacccgcgtctggacggtgcattcaccatgtactacatgtccgtcaacatcggctctttcttctctatgattgctacgccgtggctggccgcgaaatacggctggagtgttgcgtttgcgttgagcgttgtaggcctgctgatcactatcgttaacttcgccttctgccaacgctgggttaaacagtacggtagtaaaccagacttcgagcctatcaactaccgtaacctgctgctgaccattattggtgttgtggcactgatcgctatcgccacctggctgctgcacaatcaggaagttgcgcgtatggcgctgggcgttgttgccttcggtatcgtggttatcttcggtaaagaagccttcgcgatgaaaggtgctgcgcgtcgtaaaatgatcgttgccttcatcctgatgctcgaagccattatcttcttcgtgctgtacagccagatgccaacgagtctgaacttctttgcgattcgtaacgttgagcactccattctgggtctggccgtagaacctgagcagtatcaggcactgaacccgttctggatcatcatcggtagtccgattctggccgctatctataacaagatgggcgataccctgccgatgccaaccaagtttgcaatcggcatggtgatgtgttctggtgcgttcctgattctgccgctgggtgcgaaattcgcgtctgacgctggtatcgtgtctgtaagctggctggtcgcaagctatggcctgcagagcatcggggaactgatgatctctggtctgggtctggcaatggttgctcaactcgttccgcagcgtctgatgggcttcattatgggtagctggttcctgaccactgccggtgcaaacctgattggtggttatgttgcgggtatgatggctgtgccggataacgttaccgatccgctgatgagtctggaagtctatggtcgcgtattcttgcagattggtgtcgctactgccgttattgcagtactgatgctgctgaccgcgccgaaactgcaccgcatgacgcaggatgacgctgcagacaaagcggcgaaagcagccgtagcgtaaaattcagggaaactcttttacaagccgctaacttttcgttagcggctttttttttgttcagcaacgcactaccatactttaaaccacagacaaaaggagttaccgatgaaattgttctacaaaccgggtgcctgctctctcgcttcccatatcaccctgcgtgagagcggaaaggattttaccctcgtcagtgtggatttaatgaaaaaacgtctcgaaaacggtgacgattactttgccgttaaccctaaggggcaggtgcctgcattgctgctggatgacggtactttgctgacggaaggcgtagcgattatgcagtatcttgccgacagcgtccccgaccgccagttgctggcaccggtaaacagtatttcccgctataaaaccatcgaatggctgaattacatcgccaccgagctgcataaaggtttcacacctctgtttcgccctgatacaccggaagagtacaaaccgacagttcgcgcgcagctggagaagaagctgcaatatgtgaacgaggcactgaaggatgagcactggatctgcgggcaaagatttacaattgctgatgcctatctgtttacggttctgcgctgggcatacgcggtgaaactgaatctggaagggttagagcacattgcagcatttatgcaacgtatggctgaacgtccggaagtacaagacgcgctgagtgcggaaggcttaaagtaatagccatcggcccacaggtcgttgtgggccgaaatgagatatttcagagctttgttgcgctgaagtaatgttctggtttggcaatacgatcctgagcagccaccacttgcagctcatattcctgcattgctttggtggtcaccatgatttcgtagactgcagcggtcacatgttccagcgcctcctgcagcgttgccccctgaagcagtttcaccagcagtaaaccgctcgtcacatcaccaacacctaccggctggcgcataccaaaatccaccagcggacggctgatatgccaggcttcatcggcggtgaccagcagcatttcaaaacggtcacggctgtagccagctcgcgccaggtgtttaaccaacacaatttgtggcccttgcgcaatgagttcgcgcgctgccagaaccgcttcttcgacgttatttaccgcatgctcacagagtatttccagctcaaccagatttggcgcaatgatatcgctggcaggcaaaccgtgccgcacatgaaactctgcgacacccggtgcaacgatacagcctttttccggatgacccattaccggatcgcaaaaatatttcgcctgcggattcgcggctttcacctgacggacgataccgaggatatgttcaccctgctccgcgcttcccagatagccacttaatacggcatcacaggtgtgtaatttatcaatggcggcaatgccttgcacaatttcggttaaatggctgggcggcatcacgcagccagtccatttgccgtattgggtgtgattagaaaattgaacggtgttcagcggccagacgttcgcgcccaggcggcgcatcggaaactctgccgcactgttacccgcatgaccataaacaacgtgagactggatagcgagaatatttttcatcatgttccctgtataaaaaccagggggagtgatttctcactccccctttccacttaatgcattatttccagcaaatcagacagtaattctttttaccgcgacgcagtaaggtaaaacgaccaaacagacgatcttcttctttaaagaagtattcaggatcggactgtttttcaccgttaatggtgatggcattggaggcgatagttttacgtgcctgaccacgggaaggttgcagttcagaatcgaccagtgcctgcatcaggtctgcgcccttttccatctcaaccatcggtacgccgtcctgcgccagctgttcgaagtccgcttcactcagcgcactcaaagaaccgctgaacaggcattcggtaatacgttttgccgcctgtaaaccttcttcaccgtgaaccagacgagtcacctgctccgccagtacatactgggcgcgcggtgctttaccgctgtttttatcttcttcttccagggcgttgatctcttcaatgctcataaaggtgaagaacttcaggaagcggtaaacgtcggcatccgcagtgttgatccagaactggtagaatttgtacgggctggttttcttcggatccaaccagactgcgccgccttcagttttaccaaatttggtgccatctgctttagtgatcagcggaacggtcaggccaaacacctgattctgatgcagacgacgggtcaggtcgataccagaagtgatgttaccccactggtcagaaccaccaatttgcagcaccacaccgtactgtttgttcagacaggcgaagtcataaccctgcaacaggttgtaggaaaactcagtgaagctaatcccctgatcttcacggttgagacgctgcttaaccgcttctttgttgatcatctggttaacggagaagtgtttgccaatatcgcgcaggaaggtcagcacattcatattgccgaaccagtcatagttgttcgccgcgatagcagagttttctccacagtcgaaatcgaggaacggggcaacctgcttacggattttgtccacccactcctgaacagtttcttcggtgttcagcttacgctcggcagctttgaagctcgggtcgccaatcagacccgtcgcgccgcctaccagcgcaaccggcttgtggcccgcctgctggaagcgtttcaggcataacaatggaacaagatgccccaaatgcaagctgtcagcggtaggatcgaagccgcaatagagcgcgatcgggccttgcgccagtcgctctgctaacgcttcctcgtccgtcacctgggctaccagcccccgctcttgcaattgtttaatcaagttactgcttgccatcaaaatctccatgtatataacgactgcacctttgccggtacacgacttttcgccagatgcgaaagagacatagaataaagtgccagaatcaggagtaccagcgattaaagcaagatttttgcatcttttcagggtgcaagacgatcaatcttccacgcatcattttcacgctggtacaaaaagcggtcatgcaggcgatgctcaccaccctgccagaactcaatctgttcaaggctgacgcgaaaaccgccccaaaagctcggcaatggcacttcgccctgttgaaacttctgcttcagctccaggaatttactttcaaggataccgcgggcagaaatgcgactggactgcttgctaacccatgcaccaatctggctatcacgcgggcggctatgaaaatatttcatcacttcgagagtgctaagtcgttctgctttaccgatcaccatcacctggcgctcaagggtatgccacgggaacagcaggctaacgcgcggattattttcgatttgatgtgctttacggctgccgaggttggtgtaaaacaccatgcctttttcgtcgtaatgtttgagtaaaacgatgcgctgataaggctgaccatgttcatccacggtagcgaccaccatcgcggtagggtccgccagtttggcttcacaagcctgagagagccaacgttcaaaaagggttaatggatcggcgggaagatcgcggcggcgtaacccgcctttggtgtattcacggcgcagatgcgcgatttgctgcaattcgtcgttatcagacatggttttctttacggattgtcagtgggtgacgctattgtgcgccgcccctggaaaaatctcaacgctgtggattttgtaactgacagttattcaagacgatgcggtcgcgtttatagacagtcgcttcatcgcctttgctccagaaaacatagattccgtcagtgtaacgcgcgccagaggcactaatgccctgtttgagatgcagtagttgattatcgtaaacaaaactgacctcctggcgcggattattcagtttgaccgtcaacggtttttcatcacactggtattccagcgtatcggtttgcatgcgctcaaccagctgattaaaggcgctacagccggagagaaggaccggcaaaatgataattaacagttttttcatagtcatatcccgaagactttcctggtctggagggcaatacgccctccctaacgttccaagtgtaacggcagacgcggtaagaaaaattcagttaactctgatatcacgggttagcggggaaaatagcccccagtaccgtctcctggcttgcgccagtgacggaaggcagatttcctggtaatcccgccagcgtccgccaggcaagccaggcgaaagccaatgcttccatgtcatcgccactaatgccaacggcatcggtggtggtgacttctgtgcctggcagtaatgccgccagacgcgccatgagtagcggattacgactacctccaccacataccatcaatcgttcgcagccaccgctcaacaaaacttgttcagaaatggtcacggcggtgagttctgccagtgtcgcctgcacatctcggggatcaacacccggaaaatggcgcaaatggcgctccagccaaccatagttaaagtattcgcgtccggtgcttttcggtgcaggttggctgaaatacgggtcgctgagcatattttgcagcagtgggagaataactttacccgcccgtgcccactcggcatctttatcgtaaggtttaccggcctgacgccagatccaggcatccatcagcatgttaccaggaccggtatcgtagcccccaaccggctgcccaggaatgagcagactcagattggcgatgccgccaatattgagcaccattcgtcgctcggttgggtgagccagcagcgcatgatggaacgcaggtaccagcggtgcgccttgtcctcccaaggcaatatcgcgacggcgaaaatcaccgacaaccgtaattccggtgcgtgccacaatttgattgttatcgccaatctgtaaagtgtgtggtgccacgcccgtcggttcatgccagacggtttgaccgtgacaaccgatcgcaactatatctcttgcctgcagattttgttccttaagcaaggcattgaccgcatcagcaaaaagttgcccgagttgagtatcaagctgtccaaactggctaagtgtaagctgctggccctggcaaatatccagtacagcctgtttcagagataccgggatcggccaactcaaacttgccagctgtgcgacccggtgttcatcaattgtcgccaacacaacatcaacaccatcaaggctggtgccactcataacgccaataaagcggccgcttttcatagttcatcctttttcaatctgacgtttgcgcaccactcaaacataaacttttcgtgaataccatgcggaatgaccgatttttaccgttggtagtaaaacattatcttcaaatcaataatcatcatgaatgttttgtttataattggttgatcctactttcattatgatttgctcatatttggtagaacatgtaaccatggattcacatatgccatatactttgaccatgagggatgcttgcgtggcgtttcatggtgaacaggagatttttcaatgattaaacgcgtattggttgttagtatggtaggtctgtctcttgtcggttgtgttaataacgacaccctgagtggggatgtttataccgcttctgaagcgaaacaagtacagaatgtcagctatggcaccatcgttaacgtacgtccggtacagattcagggcggtgatgattccaacgttatcggtgcaattggcggtgctgttcttggtggtttcctggggaatactgttggtggcggaaccgggcgttctctggctactgcagcaggcgctgttgcaggtggcgtagctggtcagggcgtacagagtgcaatgaacaaaacgcagggtgtcgagctggaaattcgtaaagacgatggtaataccatcatggtggtacagaaacaaggcaacactcgtttctctccgggccaacgtgtcgtactggccagcaatggcagtcaggtgaccgtttctccgcgctaaataagtttgcgtgtggtcaggttactgaccacacgcccccttcatttcaccctttggcctgtaactcaatgatattatgctcaagttttgcgatgagcgtaatcagttgctccagttcctctgcggagatgccatgtaatatttccgcgcgggttttgttaataacagcttccatttcgctgatcagcggctctgccttttccgtcagtttaatacgtttagcccgacgatcgctggcacaagtttgacggctaattaaccctttttcttccagttggtccagagtacggaccagacttggctgctcgatgccaatcgcttttgccagttgaatttggctctggtctggaggtaactgatggatattgtgtaacgtaacccaatgggtttgtgttaactccagcggtttcaggcgatggtctatcagagcacgccatatgcgcaccaaccgtgccagatcagaacctagtgggctttccaatttcatctccttataattagcttgctaagatattatgcggcttttagaatagtgtgcagcaattgtattgctaaaacaaatgtattgctgcatttggttaccgtcagacatatttttcagaaattgcgcgtaaatttttcgcacttaaagaatatttattaatctaacgcaatatattcggtcgtaaaggaatctactttgtgaagtttatgctcaatgcaacaggattgcccttacaagatctggtgttcggtgcgtccgtctactttcctccgtttttcaaagcattcgcgtttggattcgtcatctggcttgtcgtacaccgcctgcttcgtggctggatctacgccggtgacatctggcatcccttgttaatggatttaagcctgtttgcgatttgcgtttgccttgctctggcaatactgattgcgtggtaactatgagtattaaaacaattaagtatttcagtacaatcattgtagcggtagttgcggttcttgccggatggtggctgtggaattattacatgcaatctccgtggacacgcgacgggaaaatacgcgcagaacaggtttctatcaccccacaggtgagcggacgtattgttgagctgaatataaaagacaaccagctggttaacgcgggggatcttctgctcacgatcgataaaacgccctttcagatcgccgagctgaacgcacaggctcagctggcgaaagcgcaatctgacctcgcaaaagccaataacgaagcgaatcgtcgtcgtcatctcagtcaaaattttatttctgccgaagaactcgataccgctaacctcaatgttaaagcgatgcaggccagtgttgatgccgcacaggcgacgctgaaacaggcacaatggcaactggcgcaaacggaaattcgcgccccggtgagtggatgggtgactaaccttactacccgcatcggcgattacgctgataccgggaaaccgctgtttgcccttgtcgacagccacagcttttacgtcattggttattttgaagaaaccaagttgcgccatatccgcgaaggtgcaccagcacaaattaccctctatagtgataacaaaacgttacagggtcacgtttccagtatcggtcgggcgatttatgatcagagcgttgaaagtgacagtagccttattccggatgttaaacctaacgtcccctgggttcgactcgcccaacgcgttcccgtccgctttgcgctggataaagtcccaggcgatgtcacgttggtgagcggcaccacctgtagcattgccgtaggtcaataatgaacgcaagcagttggtccttgcgcaatttgccctggttcagggccacgctggcgcaatggcgttatgcgttacgcaataccattgccatgtgtctggcgctgacggttgcctattatttaaatctggatgaaccctattgggcgatgaccagcgctgcagtggttagctttcccaccgttggcggtgttatcagcaaaagcctcggacgcatcgctggcagtttgctcggagccattgcggcactgcttcttgccgggcatacgctcaatgagccgtggttttttctattgagcatgagcgcgtggcttggcttttgtacctgggcctgtgcgcacttcacgaataacgtcgcgtatgcatttcaactggcgggctacacggctgccatcatcgcctttccgatggttaatattactgaggccagccagctgtgggatatcgctcaggcgcgcgtttgcgaggtaatagtcggtattttgtgcggcggcatgatgatgatgatcctgccgagcagttccgatgctactgcccttttaaccgcattgaaaaacatgcacgcccgattactggaacatgccagtttactctggcagcctgaaacaaccgatgccattcgtgcagcacatgaaggggtgattgggcagatactgaccatgaatttgctgcgtatccaggctttctggagccactatcgttttcgccagcaaaacgcgcgccttaatgcgctgctccaccagcaattacgtatgaccagtgtcatctccagcctgcgacgtatgttgctcaactggcccagtccgccaggtgccacacgagaaattctcgaacagttgctgacggcgctcgccagtagccaaacagatgtttacaccgtcgcacgtattatcgccccgctacgcccgaccaacgtcgccgactatcggcacgtcgccttctggcagcgactacgttatttttgccgcctttatctgcaaagtagtcaggaattacatcgtctgcaaagcggtgtagatgatcataccagactcccacggacatccggcctggctcgtcataccgataacgccgaagctatgtggagcgggctgcgtacattttgtacgttgatgatgattggcgcatggagtattgctagccaatgggatgccggtgccaatgcattaacgctggcagcaattagctgcgtactctactccgccgtcgcagcaccgtttaagagcttgagtcttctgatgcgcacgctggtgttacttagcctattcagctttgtggtcaaatttggtctgatggtccagattagcgatctgtggcaatttttactgtttctctttccactgctggcgacaatgcagcttcttaaattgcagatgccaaaatttgccgcattgtgggggcaactgattgtttttatgggttcttttatcgctgtcactaatcccccggtgtatgattttgctgattttcttaacgataatctggcaaaaatcgttggcgtcgcgttggcgtggttagcgttcgccattctgcgtccaggaagcgatgctcgtaaaagccgccgccatattcgcgcgctgcgccgggattttgtcgatcagctaagccgccatccaacactgagtgaaagcgaatttgaaagcctcacttatcatcacgtcagtcagttgagtaacagccaggatgcgctggctcgccgttggttattacgctggggtgtagtgctgctgaactgttctcatgttgtctggcaattgcgcgactgggaaagccgttccgatccgttaagccgagtacgggataactgtattagtctgttgcggggagtgatgagtgagcgtggcgttcagcaaaaaagtctggcggccacacttgaagaattacagcggatttgcgacagccttgcccgtcatcatcaacctgccgcccgtgagctggcggcaattgtctggcggctgtactgcagccttagccaacttgagcaagcaccaccgcaaggtacgctggcctcttaattacttaattacaccacaggcatagcgttcaccgccaccgcccagcggtttaggttgatcggacatattatcgccgccaacgtggaccatcagcgctttgtctttgatttcatccagacttttcagacgaggcgcgatgacggcatcggtagctttgccgtcattattgacgaccagtgcaggcagatcgcctaaatgcccggcaccttctggcccttcatgtttaccggtattttgtggatcaagatgcccgcctgcggattccgcggcgctggctttgccatctttggtggctggctggcagcttcctttggcatgaatatggaagccatgttcaccggggggtaatgctttcagatcggggctaaactccagacctttatcggtttcagtaatggtgacgctaccaatactctgccctaccccttggctcgtgacgaggttcatctcgactttttcactggcagcttgtgcgccggttgcaacaaccagcgccagaatagccagactaaaacgtttcataggacctccgttcattgtgcattcctgaataagtgtaaaccagtgacacatttttgaacggcggctattcctaaaagtgcttacggtacgtcgtaccccagtgccgctttacggatacgaaaccattgttgacgggtcattttcagtgtttctgcttcgacagctgcccgtacgcgctcaattttaccactaccgataattggcagcggctggcttggtaaacgtaatacccaggcgtaaaccacctgttcaatgctgcccgcgtttaactcctctgccaccacagccagttcatcacgcagcggctggaaataatcatcattaaacagacgaccaccaccaaggcaggaccacgccatcggacgaacacgcagttgttgtagttggtcgagcgtgccatccagcagtaacggctgatgcaccggggatatttccacctgattagtggcaagggtaaacggcagacgactttgcaacagggcaaattgcgcaggcgtaaagttgcttacgccaaaatgacgcactttgccgctctgatgcagatgtttgaacgcgtccgccacttcatcggcatccattaacgggtctggtcggtggattaacagcaaatccagatgatcggtcgcgagattaattaggctctgttcggcgctcttaatgatgtgatcgcggtcagtgatgtaatgaccaatgacgttttcttcacgcgcggtcgtcgcgataccgcatttactgacgatttccatccgttcacgcaggtgaggtgccagtttcagtgcctcgccaaacgccgcttcgcactgatagccaccataaatatcagcatggtccacggtggtcacgccgagatccagatgctcttcaataaaactgaccagctggcgggcggacatattccagtccatcaatcgccagtagcccatcacaaaacgggaaaactccgggccttgcggcgcaatagtaatacgctgaaccataatcgcttcctcttatcagatatgagaggagtatacgcaagattaggttcaaaagagacttggttgctccggttcgtcactactcgctggcttatttgcgcgtaatttgcgcattaatcgctgccgacaaaggcgcagcacctcttgtttttcgccatcgctcattttattccagttaaaacgctcatcacgactacgaaaacagccgcgacaaaacccgcgttcgtcagactggcaaattccccggcacgggctctggacgggaaagaactctaattgctccgccacttcgccctcctcagataagattattaccattattgaagctgttaatgtccaaagtagcaactttgcttgcactagaccgactggtctactacactccaacgcatgaacaaacacaccgaacatgatactcgcgaacatctcctggcgacgggcgagcaactttgcctgcaacgtggattcaccgggatggggctaagcgaattactaaaaaccgctgaagtgccgaaagggtccttctatcactactttcgctctaaagaagcgtttggcgttgccatgcttgagcgtcattacgccgcatatcaccagcgactgactgagttgctgcaatccggcgaaggtaactaccgcgaccgcatactggcttattaccagcaaacactgaaccagttttgccaacatggaaccatcagtggttgcctgacagtaaaactctctgccgaagtgtgcgatctgagtgaagatatgcgcagcgcgatggataaaggtgctcgcggcgtgatcgccctgctctctcaggcgctggaaaatggccgtgagaaccattgtttaaccttttgtggcgaaccgctgcaacaggcacaagtgctttacgcactgtggcttggcgcgaatctgcaggccaaaattagccgcagtttcgagccactggaaaacgcgctggcccatgtaaaaaacattattgcgacgcctgccgtttaacaggcattttttatcaccagacgaccgggagcctttatgagttctgaaaaactgtattccccactgaaagtgggcgcgatcacggcggcaaaccgtatttttatggcaccgctgacgcgtctgcgcagtattgaaccgggtgacattcctaccccgttgatggcggaatactatcgccaacgtgccagtgccggtttgattattagtgaagccacgcaaatttctgcccaggcaaaaggatatgcaggtgcgcctggcatccatagtccggagcaaattgccgcatggaaaaaaatcaccgctggcgttcatgctgaaaatggtcatatggccgtgcagctgtggcacaccggacgcatttctcacgccagcctgcaacctggcggtcaggcaccggtagcgcctagtgcacttagcgcgggaacacgtacttctctgcgcgatgaaaatggtcaggcgatccgtgttgaaacatccatgccgcgtgcgcttgaactggaagagattccaggtatcgtcaatgatttccgtcaggccattgctaacgcgcgtgaagccggttttgatctggtagagctccactctgctcacggttatttgctgcatcagttcctttctccttctagtaaccatcgtaccgatcagtacggcggcagcgtggaaaatcgcgcacgtttggtactggaagtggtcgatgccgggattgaagaatggggtgccgatcgcattggcattcgcgttagtccaatcggtactttccagaacacagataacggcccgaatgaagaagccgatgcactgtatctgattgaacaactgggtaaacgcggcattgcttatctgcatatgagtgaaccagattgggcggggggtgaaccgtatactgatgcgttccgcgaaaaagtacgcgcccgtttccacggtccgattatcggcgcaggtgcatacacagtagaaaaagctgaaacgctgatcggcaaagggttaattgatgcggtggcatttggtcgtgactggattgcgaacccggatctggtcgcccgcttgcagcgcaaagctgagcttaacccacagcgtgccgaaagtttctacggtggcggcgcggaaggctataccgattacccgacgttgtaatccaacattgcgagcggcgtaaagccgccgctatactaaaacaacattttgaatctgttagccattttgaggataaaaagatgcgtcttcttcataccatgctgcgcgttggcgatttgcaacgctccatcgatttttataccaaagtgctgggcatgaaactgctgcgtaccagcgaaaacccggaatacaaatacagtctggcgtttgttggctacggcccggaaaccgaagaagcggtgattgaactgacctacaactggggcgtggataaatacgaactcggcactgcttatggtcacatcgcgcttagcgtagataacgccgctgaagcgtgcgaaaaaatccgtcaaaacgggggtaacgtgacccgtgaagcgggtccggtaaaaggcggtactacggttatcgcgtttgtggaagatccggacggttacaaaattgagttaatcgaagagaaagacgccggtcgcggtctgggcaactaatctcctgccgggcgtgaactcatcgcgcccgcatctttactgcatcgacaagtaatatttgtcataatgcgcgctgcaatttatccgtattaagagaatcagatgtccgataacgctcaacttaccggtctgtgcgaccgttttcgtggtttttatcctgttgtgatcgatgttgaaacagccggatttaacgccaaaaccgatgcgctgcttgagattgccgccatcaccctgaaaatggatgaacaaggctggctgatgccggacaccacattacatttccacgtcgaaccatttgtcggcgcaaatttgcaaccagaagccctcgccttcaacggcattgacccgaacgatcccgatcgcggcgcggtcagcgaatacgaggcgctgcacgaaatttttaaagttgtacgtaaaggtattaaagcgagcggctgtaaccgcgccattatggtggcgcacaatgccaattttgatcacagctttatgatggccgccgcagaacgcgccagtctgaaacgtaacccgttccaccctttcgccacttttgacactgctgcactggccgggctggcactcggacaaaccgtattgagtaaggcttgccagaccgctggcatggacttcgacagcacccaggcgcactccgcgctgtacgacaccgaacgcactgctgtgctgttttgtgaaatcgtcaaccgctggaaacgtctgggaggctggccgctatctgccgccgaagaggtgtaatcgagtcgatgcctgatgacatgcaatgattcaggcatctatagtgaggctattccacgcatcctgcatgatattcacggggaatagcgttaatggcagataatccagaccctagtagcctcctgccggacgtgtttagtccggcgacccgcgactggtttcttcgcgcctttaaacagccgaccgctgtccagccgcaaacctggcatgtggcggcgcgaagcgaacatgcgctggtgattgcaccgaccggctccgggaaaacgctggcagcatttctctacgccctcgatcggctcttccgcgaaggcggcgaagatacccgcgaggcgcataagcgtaaaaccagtcgcatcctctatattagtccgataaaagccctgggcaccgacgttcagcgcaacttgcagatcccgttgaagggtattgccgatgaacggcggcggcgcggcgaaacggaagtcaatcttcgcgtagggatccgtactggcgatacgcctgcacaggaacgcagcaaactcacccgtaatccgccggatattctgatcaccacacccgaaagtctctatctgatgctgacctcccgcgcgcgcgaaacgctacgcggcgtcgaaacggtaattattgatgaagtccacgcggtagcgggcagtaaacgtggtgcgcatctggcgttaagtctggagcggctcgatgcgctgctccacaccagtgcacagcgaattggcctttctgccactgtgcgcagtgccagcgatgtggcagcatttcttggtggcgatcgcccggttacggtagtcaacccgcccgcaatgcgccatccgcagatacgaattgtcgtaccggtcgccaatatggatgatgtcagtagcgtcgccagcggcaccggcgaagacagccatgccggccgggaaggctccatctggccatatattgaaacgggtatccttgatgaagtgttgcgccatcgcagcaccattgtctttactaatagccgggggctggcggaaaaactgacggcacgattaaatgagctttacgccgcacgcttacagcgttccccgtctatcgccgttgatgcggcccatttcgagagcacctccggcgcaacctctaaccgtgtacaaagtagcgacgtttttattgcccgcagtcaccacggctccgtctctaaagaacaacgagcaatcaccgaacaggcgctgaaaagcggtgaattacgctgcgtggtcgcaacctccagtcttgaactggggattgatatgggcgcggtggatctggtgattcaggtggcaacgccgctttctgttgccagtgggttacaacgcattggtcgcgccggacatcaggttggcggtgtatctaaagggctgtttttcccccgtacccggcgtgatttagtcgattccgcagtcattgtagagtgtatgttcgcaggcaggctggaaaacctgacaccaccgcataatcctctcgacgtccttgcgcagcaaaccgttgccgccgcggcgatggatgcattacaggtagacgaatggtactcccgcgtacgccgtgccgcaccgtggaaagatctgccaagacgtgtttttgacgccacgctggatatgctttccgggcgctatccctctggcgatttttctgcttttcgccccaaactggtctggaacagggagaccgggatattgaccgcccgacctggcgctcaattgttggcggttaccagcggcggcaccattccggatcgtggcatgtatagcgtgttattacccgaaggtgaagaaaaggccggtagccggcgggtgggtgaactggatgaggagatggtatatgagagccgggtgaacgacattatcactctcggcgctaccagttggcggatccagcaaatcacccgcgatcaggtgattgtgactcctgctccgggtcgttctgcccggctccccttctggcgtggtgaaggtaacggacgtccggctgaattaggcgagatgatcggcgattttcttcatttgctggcggatggcgcgttcttttccgggactattcccccgtggctggcagaagaaaatacgatcgccaatattcaggggttgattgaggagcagcgcaacgcgacgggcatcgttccggggagtcgccatctggtcctcgaacggtgccgtgatgaaattggtgactggcgtattattttgcactctccctatggaagacgggtgcatgaaccctgggcggtggcgattgccgggcgaatacatgcgctatggggcgctgacgcgagcgtggtcgccagtgatgacggcattgttgcacgtattcctgacaccgatggtaaattgcccgatgccgcgatttttttgtttgaaccagaaaagttgctgcaaattgtccgcgaggcggtaggcagcagcgcacttttcgccgcccgttttcgcgaatgcgccgcgcgggcattattaatgccggggcgcactccgggccatcgcaccccgctttggcaacaacggctgcgcgccagtcagttgctggaaatcgctcagggatatccggattttccggtcattctcgaaaccctacgcgaatgtctgcaagatgtttatgatcttcccgcactggaacgtttgatgcgtcgcctgaacggtggcgaaattcaaatatccgatgtaacgaccactacgcccagccctttcgccacaagtttattgttcggctatgtcgcggaatttatgtaccagagcgacgccccgctggcagagcgccgggcatccgtactgagcctggacagcgagttactgcgcaatctactcggacaggtcgatccgggggaattactcgacccgcaggtcattcgccaggtggaagaagagttgcaacgactggctcctggcagaagagcgaaaggtgaagaaggattgttcgacctgctgcgcgaactggggccaatgaccgttgaagacctggcgcaacggcatacaggcagcagtgaagaggttgcgagctatctggaaaatcttcttgcagtaaaacgaatcttcccagcgatgattagcggacaggagcgtcttgcctgtatggatgatgccgccaggctgcgtgatgccctcggcgtacgactaccagagagtttgccagagatttatttacatagagtcagttacccgcttcgcgacctctttctgcgctatctccgggctcatgctctggtcacggctgaacaactggctcatgagtttagtctcggtattgccattgtcgaagagcagcttcagcaactgcgtgaacagggtctggtgatgaatctgcaacaagacatctgggtgagcgatgaagtatttcgtcgtctgcgtttgcgcagcctgcaagccgccagagaagcgacgcgtcccgttgcagccacgacctatgcgcgattgctgctggaacgtcagggcgtattacccgccaccgatggtagcccggcgctctttgccagtacaagcccaggcgtttatgagggcgtagatggcgtgatgcgggtgatcgaacagcttgccggagtcggtttacccgccagtctctgggaaagccagatcctgcctgcccgcgtacgcgactatagcagtgaaatgctcgatgaattactggcaaccggtgcggttatctggagcgggcaaaaaaaactgggtgaagatgacggcctggtggcactgcatctacaggaatatgctgcagaaagcttcactcccgccgaagcggatcaggcgaatcgtagcgcgctgcaacaagcgatagtcgctgttctggctgacggaggagcctggtttgcacaacaaatcagccaacggatacgcgacaaaatcggcgaaagcgttgatctctctgccctgcaagaggcgttatgggcgctggtctggcaaggcgtcatcaccagcgacatttgggcaccgttacgcgccctcacccgcagcagttccaacgcacgcaccagtactcgccgcagtcaccgggctcgtcgtggacgtcctgtctatgcgcaacccgtcagcccgcgggtatcttacaacacaccaaatctggctggacgctggagcttattgcaggtggagccactaaacgataccgaaaggatgctggcgctggcggaaaatatgctcgaccgctacggcatcatcagtcgtcaggcggtgatagccgaaaatatccctggcgggtttccaagcatgcaaacgctttgtcgaagtatggaagactccgggcgaattatgcgaggtcgttttgtagaaggtctgggtggcgcgcaattcgctgaacgtctgactattgaccgattgcgcgatctggcgacacaagccacgcaaacgcgccactatacaccagtggcgctctctgccaacgatccggctaatgtgtggggaaatcttctgccctggcctgcacatccggcaacgctggttccaacgcgtcgggcgggtgcgctggtggtcgtttctggcggcaaattgttactctatctggcgcaaggtggcaaaaaaatgctggtctggcaggaaaaagaggaattactcgccccagaggttttccacgcgctgactaccgcactgcgtcgcgaaccacggctgcgctttacgctaacagaagtgaatgatctaccggtccggcaaacgccgatgtttacgctgctgcgtgaggcgggatttagtagtagcccacaagggctggattggggataaagaaaggactgacggatgcccgttcgcatccgtcagtattgcaggacggattattccgcgtccggctcttcagacttgtatttagcggcagtttctttgatcagctgctgcagttcgccacgctgatacatttcgatcacgatatcacaaccgccgaccagctcgccgtcaacccacagttgcgggaaggtcggccagttagcatatttcggcagttccgcacgaatgtccggattctgcagaatatcaacataggcaaaacgttcgccacatgcggcaagcgcctggactgcctgggcagagaaaccgcagctcggcagtttcggactacctttcatgtacagcaggatcgggttttcagcaatctggcgttggattttttcgatagtggtgctcattgtcttgcttcctcaaacttctttacggcagtaatctgacattgtagcgggtcagtgcggcatcggaaaataacattttcatcacgcttttgctattttatccctttgctctatttgttgcatttcaaatattcgtttcttctctgatgccggcaaactggcgtatttataaccatttttagctttcactgctgcatttttttgcgctcgccaacgaaacgtattttttaacaataaaagctattaactttctcttcttctatgcattagaatcatcaagttttgtaaatcagacgcaggcatgatagacctgcctttacagagggacgctcagtggcgcggataaaccgtattagcatcacgctctgtgctttactttttaccaccctgcctttaacgcctatggcccatgctagtaagcaagccagggagagttctgctaccactcatatcaccaaaaaagcagataaaaagaaaagcacggcaaccaccaaaaagacccagaaaacagcgaaaaaagccgccagtaaaagtacgaccaaaagcaaaaccgcttcttccgttaaaaaatcttccattaccgcttctaaaaacgccaaaactcgcagcaaacacgccgtcaataaaacggccagtgccagctttaccgaaaagtgtaccaaacgtaagggctataaaagccattgtgtgaaagtcaaaaatgccgcgagtggaactcttgccgacgcgcacaaagcgaaggtgcaaaaagctacgaaagtggcaatgaataaactgatgcagcaaattggtaagccatatcgttggggtggcagcagtccgcgtaccggttttgattgcagcggcctggtttattacgcttataaagatttggtgaaaattcgtattccgcgtacggcgaatgaaatgtatcacctgcgtgatgcagcgccaatcgaacgtagtgaactgaaaaacggcgacctggtctttttccgtactcagggacgcggcacagccgatcatgtcggcgtgtatgtcggcaacggcaaatttattcagagtccgcgcacaggtcaggaaattcaaatcacttctctcagtgaagactactggcagcgccactatgttggcgctcgtcgggtaatgaccccaaaaacacttcgctaaaactttaccctgttgttacggcaacagggtaagttcatcttttgtctcaccttttaatttgctaccctatccatacgcacaataaggctattgtacgtatgcaaattaataataaaggagagtagcaatgagtttcgaattacctgcactaccatatgctaaagatgctctggcaccgcacatttctgcggaaaccatcgagtatcactacggcaagcaccatcagacttatgtcactaacctgaacaacctgattaaaggtaccgcgtttgaaggtaaaagtctggaagagattattcgcagctctgaaggtggcgtattcaacaacgcagctcaggtctggaaccatactttctactggaactgcctggcaccgaacgccggtggcgaaccgactggaaaagtcgctgaagctatcgccgcatcttttggcagctttgccgatttcaaagcgcagtttactgatgcagcgatcaaaaactttggttctggctggacctggctggtgaaaaacagcgatggcaaactggctatcgttagtacctctaacgcgggtactccgctgaccaccgatgcgactccgctgctgaccgttgatgtctgggaacacgcttattacatcgactatcgcaatgcacgtcctggctatctggagcacttctgggcgctggtgaactgggaattcgtagcgaaaaatctcgctgcataataactgatggcaaatgcagcattgcctgaagcgctacgcttatcaggcctacgcggatcatcgatgtaggtcggataaggcactcgccgcatccggcaagataaatcgcacgttgtcagcaactgtaacgcagaaggttatccttctgcgtttttgtttaattagctgttagcaacgcaaactgtttcaggttgttttctggcactcataaacaccagcaataatgccagtcccgcgacaatcgctcccatcaccggcacaaagctgtatcccagcccagcggaaattaccgcaccaccagcagctgctcccagcgcatttccaagattaaaggcaccaatattgacactactagacagacctggcgcttcactggcgacacgcatcacgcgcatctgtaacggcggtacgaccgcaaaggttgctgcgccccacaccaccatgctaatagctgcgccgaactcattgcgggccaggaacgggattgccagcataatcaccatcaacaacaacaaaaagcctttcaacgtgccgttaacactacgatctgccagtttgccgccgagatagttaccgatagagaatccgacaccaatcagcaccagcattgccgtgacgaacaccggtgttgcgtgggtaatactttgcagtaccggagagatataggtgtagagagtaaacattgcaccagctcccagtaccgtcgtcagcaatgcagacagcacctgcggacgcattaataccgccagctcttttttcacttcaggtcgtgcccctgcaccacctttaggtaaactgaagaacagacttaccatactaatcactcccagccccgccgttgccagaaaactcatccgccagccgatggtttcacccaaccaggtcgccgccggcacgccaccgatatttgccagggttaaccccataaacatagtggcaactgcgctggcctgtttatgttttggcaccacgcttgcggccacgacactacccaaaccaaaaaatgctccgtgattcaggctggtcaaaatgcgactaagcatcagggtcatataatccggcgcgatggcggaaagtacgttgccgagcgtgaaaattgccatcaggaaaatcaacgcactgcggcgggcacgatgagaaagtagaagcgtcatcagcggcgcgccaaccattacgccaactgcataggcactgattaacattccggcagcgggaatgctgacatccacaccgcgcgcaatgacgggcaacaagcccattgggctgaactccgttgtcccgataccaaacgcgccaatcgccagcgccagcaacggatagttaattttcatgccttatctccacctcttcgcgtcattacgcgatattcattaaagtggcgaaagcatgacagcaatcacaaaaaaatgaaaataacaaaaagagaaaacacttttgccattttgctaacaaacaggaaggagatgcgagggagaacgcgctccctcgagaggaaatcagtgcagcgcggcagtcaaacccacggctacgatcaaaccgaggacgataatcgttgttaccagtgaaaatttaaggtcggtgctcatcaagttttctccttttttattaccacacaaaaagtgatattacgcatttttacacactgtgatgaaaaaatctcccgtcatttataatgataagtgtttttaccacttccccttttcgtcaagatcggccaaaattccacgcttacactatttgcgtactggccattgaccccttcctgacgctccgtgtcgtttttccggcgtaccgcaacacttttgttgtgcgtaaggtgtgtaaaggcaaacgtttaccttgcgattttgcaggagctgaagttagggtctggagtgaaatggaatggcaacaataaaagatgtagcgaaacgagcaaacgtttccactacaactgtgagtcacgtgatcaacaaaacacgtttcgtcgctgaagaaacgcgcaacgccgtgtgggcagcgattaaagaattacactactcccctagcgcggtggcgcgtagcctgaaggttaaccacaccaagtctatcggtttgctggcgaccagcagcgaagcggcctattttgccgagatcattgaagcagttgaaaaaaattgcttccagaaaggttacaccctgattctgggcaatgcgtggaacaatcttgagaaacagcgggcttatctgagcatgatggcgcaaaaacgcgtcgatggtctgctggtgatgtgttctgagtacccagagccgttgctggcgatgctggaagagtatcgccatatcccaatggtggtcatggactggggtgaagcaaaagctgacttcaccgatgcggtcattgataacgcgttcgaaggcggctacatggccgggcgttatctgattgaacgcggtcaccgcgaaatcggcgtcatccccggcccgctggaacgtaacaccggcgcaggccgccttgccggttttatgaaggcgatggaagaagcgatgatcaaggtgccggaaagctggattgtgcagggtgactttgaacctgaatccggttatcgcgccatgcagcaaatcctgagccagccgcatcgccctactgccgtcttctgtggtggcgatatcatggcaatgggcgcactttgtgctgctgatgaaatgggcctgcgcgtcccgcaggatgttagcctgatcggttatgataacgtgcgcaacgcgcgctattttacgccggcgctgaccacgatccatcagccaaaagatagcctgggtgaaacagcgttcaacatgctgttggatcgtatcgtcaacaaacgtgaagaaccgcagtctattgaagtgcatccgcgcttgattgaacgccgctccgtggctgacggcccgttccgcgactatcgtcgttaatcacccgttgcgggagtctcttccggctcccgcagccactccttattcagcgtctcactatcgccgagatactcaagcaaccaggttaacgcagggctcatatcattttgctgccatgtcagacaacatgcgctatccggaaaggggttttccagttctaatgctacccacttcccctcattaagccacggtttggcgaaatgtgttggcaccatccctatgcataatcctgcgctgatacaggttgcgctactttcccagtcaggcacgacaactcttttttggttatccagcaaccaggtaatacgtttaggtagcgttcggctggtgtcttcgcgcaccaagctcggccagttgcgcaacgtatcatcgctgaacgggccatccatcaacgccagcgggtggtgactggcaacaacgcaactccagcttagcatccccatatcccggaaggcataacgaccgcctaccggaatcgcgcgtgttgcgccaatcgccagttccacgcgcccgtcggaaagcgcatcccagacaccgttgaacacttcctgaaagacaagaagttcgacatcatcaaaatggcgataaaaatcaacgatcatctgccgtgtacgttctggcctgacaatattatccactgcgatagctaactgaccgcgccagccgttcgctatctgctgacattgctggcgggtgatctgcatttttttgacaacagagcgcccttctttgagaaaccacgctccagcagcggtcagctccacatcacggtgccgtcgttcaaagagcggcaccgccagccactcttccagctgacgcacggtatagctgaccgcagaaggaacgcgatgcagctcctgtgccgcagcgctaaaactaccattacgcgctaccgcatcaacaacttcgagactatattcactccacatagtctgcctgcaaaatttttgaaaccagtcatcaaatattaccgtttcacaacactaatttcactccctacactttgcggcggtgtttaattgagagatttagagaatatacatgcaacctgggaaaagatttttagtctggctggcgggtttgagcgtactcggttttctggcaaccgatatgtatctgcctgctttcgccgccatacaggccgacctgcaaacgcctgcgtctgctgtcagtgccagccttagtctgttccttgccggttttgccgcagcccagcttctgtgggggccgctctccgaccgttatggtcgtaaaccggtattattaatcggcctgacaatttttgcgttaggtagtctggggatgctgtgggtagaaaacgccgctacgctgctggtattgcgttttgtacaggctgtgggtgtctgcgccgcggcggttatctggcaagcattagtgacagattattatcctagtcagaaagttaaccgtatttttgcggccatcatgccgctggtgggtctatctccggcactggctcctctgttaggaagctggctgctggtccatttttcctggcaggcgattttcgccaccctgtttgccattaccgtggtgctgattctgcctattttctggctcaaacccacgacgaaggcccgtaacaatagtcaggatggtctgacctttaccgacctgctacgttctaaaacctatcgcggcaacgtgctgatatacgcagcctgtagtgccagtttttttgcatggctgaccggtagtccgttcatccttagtgaaatgggctacagcccggcagttattggtttaagttatgtcccgcaaactatcgcgtttctgattggtggttatggctgtcgcgccgcgctgcagaaatggcaaggcaagcagttattaccgtggttgctggtgctgtttgctgtcagcgtcattgcgacctgggctgcgggcttcattagccatgtgagcctggtcgaaatcctgatcccattctgtgtgatggcgattgccaatggcgcgatctaccctattgttgtcgcccaggcgctgcgtcccttcccacacgcaactggtcgcgccgcagcgttgcagaacactcttcaactgggtctgtgcttcctcgcaagtctggtagtttcctggctgatcagtatcagcacgccattgctcaccaccaccagcgtgatgttaagtacagtagtgctggtcgcgctgggttacatgatgcaacgttgtgaagaagttggctgccagaatcatggcaatgccgaagtcgctcatagcgaaagtcactgatctatatcgatatacttatacttaggctgctaacaaaattttgttgtatgattgaaattagcggcctatactaatttcgagttgttaaagctacgataaatattatgtttttacggggacaggatcgttcccgactcactatggatagtcatttcggcaagggttcctcctttccctctgttctacgtcggattatagactcgcggttttttctgcgagatttctcacaaagcccaaaaagcgtctacgctgttttaaggttctgatcaccgaccagtgatggagaaactatgagtagtagctgtatagaagaagtcagtgtaccggatgacaactggtaccgtatcgccaacgaattacttagccgtgccggtatagccattaacggttctgccccggcggatattcgtgtgaaaaaccccgatttttttaaacgcgttctgcaagaaggctctttggggttaggcgaaagttatatggatggctggtgggaatgtgaccgactggatatgttttttagcaaagtcttacgcgcaggtctcgagaaccaactcccccatcatttcaaagacacgctgcgtattgccggcgctcgtctcttcaatctgcagagtaaaaaacgtgcctggatagtcggcaaagagcattacgatttgggtaatgacttgttcagccgcatgcttgatcccttcatgcaatattcctgcgcttactggaaagatgccgataatctggaatctgcccagcaggcgaagctcaaaatgatttgtgaaaaattgcagttaaaaccagggatgcgcgtactggatattggctgcggctggggcggactggcacactacatggcatctaattatgacgtaagcgtggtgggcgtcaccatttctgccgaacagcaaaaaatggctcaggaacgctgtgaaggcctggatgtcaccattttgctgcaagattatcgtgacctgaacgaccagtttgatcgtattgtttctgtggggatgttcgagcacgtcggaccgaaaaattacgatacctattttgcggtggtggatcgtaatttgaaaccggaaggcatattcctgctccatactatcggtagcaaaaaaaccgatctgaatgttgatccctggattaataaatatatttttccgaacggttgcctgccctctgtacgccagattgctcagtccagcgaaccccactttgtgatggaagactggcataacttcggtgctgattacgatactacgttgatggcgtggtatgaacgattcctcgccgcatggccagaaattgcggataactatagtgaacgctttaaacgaatgtttacctattatctgaatgcctgtgcaggtgctttccgcgcccgtgatattcagctctggcaggtcgtgttcagtcgcggtgttgaaaacggccttcgagtggctcgctaaaggctattctatcgccccctctccgggggcgatttcagatcaggcttctgtgcctggttgattcatggcattttctcgtgccgccagcacacgttctaccgtatctaccactgcctgagtttgtggatcgatttcaatgttgacgcgtgcgccaagttttttcttcccaagagtcgtgcgttccagtgtttcccgaattaaatggacgcaaaaacgcgttggcgtgacttcgccgacggtcaggctaataccgtcgatgccaataaatcctttgtacagaatatatttcatcaactgactatcctggactttaaaccagatctggcgattattttcactggttaatattttcgccacttcagcagtggtcataatatgaccactcattaagtgtccgccaatttcatcactgaatttcgccgcacgctcaacgtttacccaatcccccacttttaaatcgccaagattggtaatgcgtaacgtttctttcatcaggtcaaaactgacatggttgccgttaatttccgtcacggtcaggcagcaaccgttatgcgccacggaagcaccggtttccaggccgtccagcatgtggtcgggtaactccaccacatgcgtacgaaaatttggtttctcgtcaatgctcaccagttttgcggtgccctgtacaatccccgtaaacatacttacaactcctgaaatcagttaagacattctgttcagcacaatagcaggtggaaaacgcccttaccagtgaaggggtaagaatggctattttttcactggagaattaataaatcctcgctacaatagactgaatttcccctgcttcttctttttgctgcccattcaggcggctttttagtctctcatataactacaaataaaaggtgttcacgtgcagaagtatatcagtgaagcgcgtctgttattagcattagcaatcccggtgattctcgcgcaaatcgcccaaactgcgatgggttttgtcgataccgtgatggcgggcggctatagtgccaccgacatggcggcggtcgctatcggtacttctatctggcttccggcgatcctctttggtcacggactgctgctggcattaacgccggttatcgcgcaattaaatggttccggtcgacgtgagcgcattgcgcatcaggtgcgacaaggtttctggctggcaggttttgtttccgttctcattatgctggtgctgtggaatgcaggttacattatccgctccatggaaaacatcgatccggctctggcggacaaagccgtgggttatctgcgtgcgttgttgtggggcgcgccgggatatctgttcttccaggttgcccgtaaccagtgtgaaggtctggcaaaaaccaagccgggtatggtaatgggctttatcggcctgctggtgaacatcccggtgaactatatctttatttatggtcatttcggtatgcctgagctcggtggcgttggttgtggcgtggctactgcggcggtgtattgggtcatgttccttgccatggtttcttacattaaacgcgcccgctccatgcgtgatattcgtaacgaaaaaggcaccgcaaaacccgatcctgcggttatgaaacgactgattcaactcggtttgccgattgcgctggcactgttctttgaagtgacactgtttgccgtcgtggctctgttagtgtctccgctcggtattgttgatgtcgcaggacaccagattgccctgaactttagtagtctaatgttcgtgcttccaatgagcctggcggcagcggtaactatccgcgtaggttatcgtctgggtcagggcagtacgctggatgcgcaaaccgctgcgcggaccgggcttatggtgggtgtctgtatggcaaccctgacggccattttcacggttagtctgcgggagcaaatcgccctgttgtacaacgacaatcccgaggttgtaacgctggctgcgcatttgatgttgctggcggcggtatatcagatttctgacagtatccaggtgattggcagtgggattttgcgtggttataaagatacgcgttccattttctatattacctttacggcttactgggtgctgggcttgccaagcggctatattctggcactgaccgatctggtcgttgaacctatggggccagcaggcttctggataggctttattattggcctgacgagcgcagccattatgatgatgttgcgtatgcggttcctgcaacgtctgccgagtgccatcattctgcaacgagcatcccgctaataaagacaaggcgcaaccttcacgggttgcgcctgtatttttacgcaggctggagcgttgcgccaatcccgtcttcgtctggctgtaatttcagagcgttacacagagtttgccgactggcatctgttatctcaacgtgtatatccccggtaacttcccctttcacattgatgaagtcaggactaatttcttttgcactggtttgcaggcaaatcgctccctctccgcgcaggcgtttcactttcagttgcacatgcgttgccgcatcagtgatcagccacagttttccaccattcagattgatgttaccaacaatgaaagtgacactgtcaccttttaccgtactgccgtctagaatcaacacaccgccctgctgtacagtaatcgtactttgttgcagctctgcgccataaccaataatcatactagcgccgtccagtaatgcaacactcccggtcagttcaaccggtgcgcgatcttcctctacgacaaaattttcgtccgcgctggtgggactcaacaggatcactgtcccaccttgtattaccgcgttttccagcgtaccggcatgcacttcagcccgaccacccacattcacggacaggttttgcgtcttaccggaactgtagagctgaaggccatccgtccccagacgataaatggatccattctcaacaatagtgtcagagtcttcaccaccgagattattcatggtgccaccagcaagcaacgtatcactggctttcccggccagcataaaaacgccgccctgattaatctcacaattgctggcttccccacctggatacaccaacaattcaccaccttcatctaccacgaccgcactggttgtcccattaaccaacaggccgccctcttgatcgagaatgattttttccgcgcgatgtccttccagtacacgcaggttaccgccattttccagcaacaaaccgcaggcataacctttatcaacgctgaattcaccttcgggatggcggccattaaccgtagcgagcgtagagagactaattgcgcctccctcggactgaacaatatctgtggcaatggcaccatcgctgacgcttagcgtgccattgttaccgtactgtgtgcatttggcgatcccaccggttgccactttcaaccagccagcccccgtgaccacggtattttcggctcttccgccagcttcaacaatcaactcgccttcagtaagttgcgtcgcgccaatgacctcgccggtcttaacaatttgcacgttcccgtcgctcatcaagtttttcgcatcagatcccatgatttattcctttgctgcatctgtgtgcctttattgctacctaagtgtaaaggctacggaggatttatccacgacagatttgagatggtggcaaacaactctgtttaaactctgatacacgaattattgggttgtatcagatgtaaatgcgatcctgaataaaaatcacccttgcaaatcaacaaaatatagccaatttgcttaaaagctctgcaaacggtcgaaatagcgcagaaaattacgttttgcctcttgccaccttcccactctgccgctaatattcgtccccgttgtcacctacaacgttgcgttcatagctcagttggttagagcaccaccttgacatggtgggggtcgttggttcgagtccaattgaacgcaccatcctgcgtccgtagctcagttggttagagcaccaccttgacatggtgggggtcggtggttcgagtccactcggacgcaccagattttcttaatctggtcttctcctttttccctctgtttcttctctgtatccaatacgttaaaagatttacactgtcttcgtatgcgttatcagaaggagaatcgctatggcaactttgttacaacttcattttgcttttaatggcccatttggcgacgcaatggctgagcagcttaaaccacttgctgagagcattaatcaggaacctggttttctgtggaaggtatggacagaaagtgaaaagaaccacgaagccggtgggatctaccttttcactgatgaaaaaagcgcccttgcctatctggaaaaacatactgcccgactgaaaaatctcggcgttgaggaagttgtcgccaaagttttcgatgtcaatgagccacttagtcaaatcaatcaggcaaaactcgcctgacagaatttaatcaagggcggttagcgcccttttcatccctgtctgaaatttctcaaattctaaaaatctcaaccaaacttatctgataacactaaattcgaaagaatgcgtacaggtaagtaacaatgaaaaaaattgctattgtgggtgccgggcctacggggatctacaccttattcagccttctacagcaacaaactccactttctatttctatcttcgagcaggctgacgaggccggtgtcgggatgccatacagtgatgaggaaaacagtaaaatgatgctggcaaatattgccagtattgaaataccgccgatttattgtacgtatctcgaatggctacaaaagcaagaagacagccatctccagcgttatggcgttaaaaaagaaaccttgcacgatcgtcagtttttaccgcgaattctgctgggcgaatatttccgcgatcaatttttacgactagtagaccaggcacgacagcaaaaatttgcagtggctgtttatgaaagttgccaggttaccgatctgcaaattacaaatgctggcgtcatgctcgctacaaatcaggatttacccagcgagacgtttgatttagcggtgatcgccacgggtcacgtctggcctgatgaagaagaagcaacccgaacgtattttcccagcccgtggagtggcctgatggaagcaaaggtcgatgcgtgtaacgtgggtattatgggaacatccttgagcggactggatgcggcaatggcagtggctattcagcatggtagcttcattgaagatgataaacaacacgtcgtttttcaccgcgataacgcaagtgaaaagctaaatatcacgttgttgagccgcacgggtattttacccgaagccgatttctattgccctattccctacgagcccttacacatcgtcaccgatcaggcattaaatgctgagattcaaaaaggcgaagagggccttttggatcgggtatttagattgatagtagaggaaatcaagtttgctgatccagactggagtcaacgcatagccttagagagcctgaatgtcgattcctttgctcaagcctggtttgccgagcgcaaacaacgcgacccatttgactgggcagaaaaaaatctccaggaagtcgaacgcaataaacgagaaaaacatactgttccctggcgttatgtcattctgcgcctgcatgaagccgtacaggaaattgttccacatctgaatgaacacgaccataaacggttcagtaaaggccttgcccgggttttcatcgataattatgcggcaatccctagtgagtctattcgtcgcctacttgccttacgtgaagcgggaatcattcatattctcgccctcggtgaagactacaaaatggaaattaatgagagccgcaccgtcctgaaaacggaagacaacagctacagctttgacgtttttattgatgcccgcggacaacgtccgcttaaagtgaaagatatccctttccctgggctacgcgagcaattacagaaaacaggggatgaaatccctgatgttggcgaagattatacgttacagcaacccgaagatattcgtgggcgcgtagcgttcggcgcgttgccctggttgatgcacgaccagcctttcgttcagggacttacggcatgtgcagaaattggtgaggcgatggctcgggcggtcgtaaagcctgcatcccgtgctcgtcggcgtcttagctttgattaaaggtaaagctatcagcactcaacaaactgatgctgttcattaagacgatagcggactccggctcgaatattgttttcaccttcaatggcgacggcgaagcgaactctttcgccgtcatgatatgccagtgcggcgcttcctcctggcccgagaataatactgtcgaccacgcccgtgctcactaccgtactattttcaccgctggcaatgatgtgtacattgtcgccgctgttggcaattctggcgtttgcgccaaagctggcgatttgcaccaggtcaccattactggcgacatgacaccgttcacccaatgtacaaacgcgtactcgcattccggtattcgcaatccgactgctatctccagcgctgcttatccggctagaattaccggttacagcaacccgtgcgcgttcaccggagctgccaatgtgactgttaaagccgacacttccaatccgcacgctataacccatactggcaatttgcgcggcatacccagcggttgcgattctggcgttatcctcacaacagccgatgcgagcatgatcgtcgctgcgggcaaactgactgcaaaatggtctctctccggggtctgtggccagtttttgcatagaggaaacttcctgatgcgcgaagttttcatccgccagccattttttccacgcatactcaaccagactctccgcccagtccgtatatccttcctcaatcagtgcatgatgaatatcggcataactaccgccgcgtgggaaatggcgcaggaaccagcgatacatcaccgctccgatacgccattctcgcaggtctgcttgtgtaatgatcattcgttagtgccggtgatagccatcgaccatgcttttaaaggtttcgtgtggcgtacgccccgtggtgcaaagataaagatgaccgaagataaaaaagaggcttataaatgccagagcaaaatgtgtctgcaataaccagtatcttacgccaggaaacacatctcccacggcttgcggatagagacacagcagccccgtcaatagtaacaacggcagcaatccatacatgacaccaacataggcgacctgctgtaagggattaaatttagactgggttgttgccgggaaaggatgttcttccccctgcataatgccaaacaaataaaatcgcgtttgttttgccgctcgttccagccacccctgacgacgaatgcgatagtggtgaccattatccccaacggcattgatcagcacaaagccgagccagcatgccagtaacaaaaatccgcaaacttcatgcaccgcaaccagacttttaaccgcagttgcgcccaccatcgcaaagtgatttatcagcccactggccagcaacaatacaaagagtaacgcattgctccagtgccataatctgaccgctttgctgtaaagataaatcttctcaccatgatcggtggcacttttcttcacgccacgagcacgaagcaaggcatgcagccccagcaccaaccacatcccaaccagcaatactccggcaatgatcaaccacaccggccaaaattcgggagtgaactgtggcacatagttcgctaactggctctgaaactgttcagcatgttggctcgggttcatacattttcctttttaatcaaatgttgaccgaaccggcgatacagatgcggtttcccggcaccaggtagctgatattgatagtatttattttgctgcaaccacgcctgaatttctgggctatcttcgcgaccaaagatcaatgcgtgttccgggcaggcgctgacgcaaatgggcggaaagccttttgccagtcgggactcagcgcagaaatcacatttatctgccactttagtgacagggttaaggtagcgaacctggtacggacaagcgccaatgcaataactgcagccgatgcactggcttttttctacccgcacgatcccctgctcatcacgccagctcgcccccgtcgggcaaacgtcgatgcacggagcatcttcgcagtgctgacaactctggcgaaaaaagtgatactgcgtttcgttgtcgttatcggtgactggaatgtgtgctatgcttaaacggcttccctgagcggggacgtggttagttttacggcatgcgcgggcgcaaatattacagccattgcaccgactctcgtcatgaatcatggcataccgaacttccttttcttgcctcgtgttcgctaacagagaagacgcagaaccagtaaaaaagattactgttcccatccccagaacaaatttgcgtcgagtgaaggacatctgattatcccctaatgcagtggctgcaactgtccaccctatccatgacatctccctgaaatttcaggggttctgaaactgctctacctcgaaccattcgcataagccataagccttgccataggtcataaatcgctcgctaaacaagtacaacaccgccgtgctactctccacctgccgtatatcggcatattcaggtgcaacatccatcgcggcgatcgcggcttcaatctgcgcttcctggaagtaatatggcgcttgcatcagcatggcgactttgtaaggacgaggatacgtctggcactcaaaacgaacggcgtgtgcaatggcgcgacaaatgtcctgctccacaacttgcaaagacatcgccgcgtagttttcactcatggcctgcgtactgtaatagtaatcatccttgcttcccgtcaaacaagcgatatccgcgtagtctccgttctgcttaatgctttccagcaaaacactcagttcctcttctgcaaccaaatagggtgggctgagaaacacggcgcgcgccaccagctgcccagccgcagaatgctggcgaatgaactcagccaggatttcagcaggttctggttcggttaccgtatcaacggggtgacgcatcccctgcaaccattgccgcttcgcctcgtcaacttcgctgactttcgctaacggcaattcatcctgatggttcatcttacccattccttacgcaggcagtagattgtgtgctgccagatcggcggcaatatcttccagccccagacgctgcaatgtttcgcgggttggacaaccaagctgtgggtcccagcccatttctttgtagaacatcgtgaggctagcatgcatatcgtcacgatccattttgtcagtaccttcagtaaagaccgggatctgcggatccttgtcgaatacccaggaacagataagatcgtgttcattacgcatatctttggtttgcatcagttttaccgtgtaggcacgatgcaacgtaaaaatacgctctgcagctaaatctaatttttcctgagtcatctcttcgccggtgatcgctttgaagaatttggcttcaagcgccagatcgccccggtaattacggcttttcagcgggctaacggtcattggccagacccagttgcacagggtgacggcgttatgcaaacagacccgcaacaggctccactttgcatatttaatttttgcgtcattgattggcgtgtagtttttggtttcatcgtaagcatcttcagaaccaaaaagttctttcgccacttcacgttgcagtttcaatggcaagccggaaccaataaagttgatatgggtatgcgtcatgcagtcacggttgaacatacagttaacaatggaaccgacctgcgcactcgcttcattggcatggtgaaccggatagccaaacgggctccagagtttatttttcgcgtagccccagtactcttcacccaaattccagcgttctgcgatggcataactaccatcagccaggtgactcagctcacccacacgatgcgccagacggtagtaaaaatctttaatgaagttaacgtcacccgcttccagttgatcccagcgaatttctgcatactcttcagctggcagaacacgcttgaacacacctttgctgtaacaataagtaaagtcgcgatgcaactgcccgtagttacaccataggccgtagtcatcgaacaaattcagacccaccaggttaccaatcacacgaccatcgtctttatcttcaaaatctttcggcccgttcgggaagatggtggtatggacaaagtttgctacacaagtgttaccacctgtgctgggcacgccaaactctttcacccgaggaatattcatttgggtcatacaacggatcgggcaagagtggcagccgctcatttttactgtgtatttctctgccgccggtcctaagtcaaaaacggatttataggtacgaaagccgaccgtattctgattgcctggcggaatttcacccgtttcaatcggaccaccttcagccgcgccccaaaacagccctttacgtgctgtccagcgactcttgggatcactatactctgcccagctttgtggcgtacttggcacgacatggttgttattcgcaccaataagttcagtcatcatgtaatcattgagacgcttcatctcctgacgatcggcaatgttgacccctttcgtcccttcaaccgcaatcgctttcaggtttttgctacccattattgcgccagttcccgcaccgccgctgtggttacggctattcaacatgccagagagaggaacaaggttttccccagcctgaccaatagccgccacacaggtttccggactggtcaatcgacaaatttcttccgtcgttgcgcgcgtcccttttccccataagaaatcggctttttccaggctaactttgtcatctttaatcttcagccataccggacttttcgccttcccttcgataataatgacgtcgtatccagcgaatttcatttgcgctgcaaaaaagccacccatatgggcatcgacgactaaatttcctttggtaaaagtagaaagactggtgatatttacgcgagaactacagggggcaccagatccagttaatgggccggtagcaaagactaatttattcgcttcatcgaaaggtttcgtgcctggcggtacttcgtcatacataattttgtagccgaagcccatgccaccgacaaaacttttaaacttactggaatcttcgagggtaatatttcctgtcgtgagattgactcttaatatattacctgtccaaccgttagccatgattttttcctttgcaagattcacacagtaatatctttccactcgataatttttaacgcccctgttgggcaggcgtttgcgcattcaccgcataacacacatttgctggattttttactttcggtatttacggtggccatcatccacgggcatgccgtagtacaggcgctacagccaatacagcgtttatgatcgacggtaatacagccttctttctgctgccaggtaatcgcaccaatcgggcagacgttcatgcattgcggctctttgcattgacggcaggtgtccgcggtatagttgagatcgccatacaggccgccgccagagccaaccccgttgtcgccaaagaaataattgcgatggattttgatacgggagaagaatgtccctacactgccatcgttgaagttggtacaagagatttcacagcggtggcaacccgtgcatcgcgctcgctgggtcaccagcacccctttgggggtatttatcaaccctactgtgccgctatcaatatcttcctgtttgcaacccaaaagactcagtaacgcaggggcaattgttagaccagcaaggccttttccacttatacgcaagaattctaatcgcgttaagccaatatctaatagtggacgatcaaccgggttcatttatttcgcatcctcttcgcaaacacagtgctgacaattcagcagcctgatattaagcattcaactaatacgctgctgactctgtccccaacaccagatattttccctaacccgatagtgtatgagaaaagattaacgccgataaactaatcctttatggttaggagaaaaaataatgtgattattctgagcccttaacattgatcgttatcaattaaaattacaaagcaagaaattataagtgaactgatatttattatcatttgaaataaatttaacttaagcgacaattatttgtgactttcattgcagaaaataaaaataacattatcgctataaattaaaatacataccgaaattcgtataatttcagcagttgttatttagaatgattaactggaccgcaactgaagcaagaatatcaggatgaagcttaccgcctcatcctgaatggtcattttaccagtgcgttaatgacggtttccatcgcctgcttttccagctcactgcgctgaatgcgtttattggctaatgctgtacgtaatacgcctgcgataacaatatgctttggttcctgccccagatcgcgcatttccagcacaactttaccgacaactctgcacatttctcggtacagttcatcctcttttgtccgatttcccattctttatacctatttatcatgccaactatcagcatatatcaatctaaccaattaaacaaaaatcaaacaaaatcagacaaataacgcgataaattattttaactgtagcaattgagcgatgatatatttatacaccggatgaactttcacttatcctcacactgacaacttcggcaccagacgttgcgcaaacagtgaagtttttgcgtaaccttttccctggaacgttaaatctttgataacaatttattgtctaacaagttgtatattttttgaaacgctgtttttgttttccttttggattaatttcagcgtataatgcgcgccaattgactcttgaatggtttcagcactttggactgtagaactcaacgactcaaaaacaggcactcacgttgggctgagacacaagcacacattcctctgcacgctttttcgatgtcacctatccttagagcgaggcaccaccactttcgtaataccggattcgctttccggcagtgcgcccagaaagcaagtttctcccatccttctcaacttaaagactaagactgtcatgaaaaagaccaaaattgtttgcaccatcggaccgaaaaccgaatctgaagagatgttagctaaaatgctggacgctggcatgaacgttatgcgtctgaacttctctcatggtgactatgcagaacacggtcagcgcattcagaatctgcgcaacgtgatgagcaaaactggtaaaaccgccgctatcctgcttgataccaaaggtccggaaatccgcaccatgaaactggaaggcggtaacgacgtttctctgaaagctggtcagacctttactttcaccactgataaatctgttatcggcaacagcgaaatggttgcggtaacgtatgaaggtttcactactgacctgtctgttggcaacaccgtactggttgacgatggtctgatcggtatggaagttaccgccattgaaggtaacaaagttatctgtaaagtgctgaacaacggtgacctgggcgaaaacaaaggtgtgaacctgcctggcgtttccattgctctgccagcactggctgaaaaagacaaacaggacctgatctttggttgcgaacaaggcgtagactttgttgctgcttcctttattcgtaagcgttctgacgttatcgaaatccgtgagcacctgaaagcgcacggcggcgaaaacatccacatcatctccaaaatcgaaaaccaggaaggcctcaacaacttcgacgaaatcctcgaagcctctgacggcatcatggttgcgcgtggcgacctgggtgtagaaatcccggtagaagaagttatcttcgcccagaagatgatgatcgaaaaatgtatccgtgcacgtaaagtcgttatcactgcgacccagatgctggattccatgatcaaaaacccacgcccgactcgcgcagaagccggtgacgttgcaaacgccatcctcgacggtactgacgcagtgatgctgtctggtgaatccgcaaaaggtaaatacccgctggaagcggtttctatcatggcgaccatctgcgaacgtaccgaccgcgtgatgaacagccgtctcgagttcaacaatgacaaccgtaaactgcgcattaccgaagcggtatgccgtggtgccgttgaaactgctgaaaaactggatgctccgctgatcgtggttgctactcagggcggtaaatctgctcgcgcagtacgtaaatacttcccggatgccaccatcctggcactgaccaccaacgaaaaaacggctcatcagttggtactgagcaaaggcgttgtgccgcagcttgttaaagagatcacttctactgatgatttctaccgtctgggtaaagaactggctctgcagagcggtctggcacacaaaggtgacgttgtagttatggtttctggtgcactggtaccgagcggcactactaacaccgcatctgttcacgtcctgtaatattgcttttgtgaattaatttgtatatcgaagcgccctgatgggcgctttttttatttaatcgataaccagaagcaataaaaaatcaaatcggatttcactatataatctcactttatctaagatgaatccgatggaagcatcctgttttctctcaatttttttatctaaaacccagcgttcgatgcttctttgagcgaacgatcaaaaataagtgccttcccatcaaaaaaatattctcaacataaaaaactttgtgtaatacttgtaacgctacatggagattaactcaatctagagggtattaataatgaaagctactaaactggtactgggcgcggtaatcctgggttctactctgctggcaggttgctccagcaacgctaaaatcgatcagctgtcttctgacgttcagactctgaacgctaaagttgaccagctgagcaacgacgtgaacgcaatgcgttccgacgttcaggctgctaaagatgacgcagctcgtgctaaccagcgtctggacaacatggctactaaataccgcaagtaatagtacctgtgaagtgaaaaatggcgcacattgtgcgccattttttttgtctgccgtttaccgttactgcgtcacgcgtaacatattcccttgctctggttcaccattctgcgcactctctacactaggcgcattgctggctgcgggagttgctccactgctcacgctaaccggataccctgcccgacgatacaacgctttatcgactaacttctgatctacagccttattgtctttaaattgcgtaaagcctgctggcagtgtgtatggcattgtctgaacgttctgctgttcttctgcgcttagtggtcgatgtacttcaacataacgcatcccgttaggctccacggaatatttcaccggttcgttgatcactttcaccggcgttcccgtccgcacgctggagaacaaggctttaatatccggtgcattcatgcgaatacacccactactgacgcgcaaaccgacgctgtccggcgcactggtaccatgaatgaggtattcgccattaccatgcgcgaggcgcagtgcgtaacgtcctagcgggttatttggtccggcaggaacgactggcggtaatttaatgccacgctccaggctacgctgacgaatgcctgccgtaggcgtccaggttgggttagggattttctgcccaacacgcgtttccatcaccggcgtttccagcccctgcaatccaatacctattggataaacctgcacaatattttctcccggcggataataataaaggcgcagctctgcaaggttaacgataatcccctgacgcggtgcatcaggtaataacagttgactaggaatagttatcgtcgtaccaggttttggcaccggggcgatagtgttattggcttcaaggatcaacattgccgcagtatcaaaacgtcgggcaatagcctgaaggtttttatccccttcttgcaccgtatacgtttgattttgcccaaccagtcggcttccggttggtggtagcggataatcaaccgcccaggcagcctggatggcgctaaaagcgccgataagcgtgagtgtaagcaaagacgcgcgtttcattgtaaacctcctgtatttgccggagactcacgctgaaacgtcggatggcgcttatgttcacctgaaaccaaaacactcctgtgcaggtcagtgtaaacattgaccatccggcaatgtgagccaaccggatgaaagctgtccttttagtttagctaagtgcagcggctttggcgcgaattgcgcgaatcatcgcttccagaccttgactacgagatggggtgagatgttgggtgagcgccattttttcaaaccacggacgcacatcgaaattgacaatatcctgcggcgtcatctgatcgtagagaataaagacgaccgcaataagccctttcacaatcgccgcatcgctgtcgccctgtaattcaataattccctgggcattctggcgcatgacaatccacacctgactctgacagccctgaatgctattttgtggacttctgtcttcgtcgcgtaattctggcagacgctggcccagctcaataatgtagagatatttctcttcccagttggcgcagcgtaaaaaattacgcagcaacttttctttatccggcaataaagccatagtgcctccctgttatcccagcaaacggtgaatacgttgcaggccggtcaccagacgatccacttcttcatgggtgttatacatggccaggctcgcccgacacatcgcagggacgttgtaataggccatcaatggcattgcgcagtgatgtccggtacgcacagcaatgccgtaattatcgagaaaactgccaacatcataggcgtggtgtttaccgagattaaaagcaataacgccaagcctgttttgtgggccatagagagtgagatccggtacagattccagctgacttagcgcataatgcatcagattctgttcatactcggctatgttattaagccccagcgcgctaacatactccagcgccgcgccaagaccaatgatgcccccggtattgggtgtaccggcttcaaaccgccatggtgctttggtccaggtagtgccttcactcaggctgacggtggcgatcatagaaccgcccccttcccacggcggcatctcctgcaacaaggcttctttcacataaagaatgccaattccggtggggccatacagtttatgcccggagaacacgtaaaagtcgcaatccagcgcctgaacatccaccggatgatgcatcaccgcctgagcgccatccaccagcacttttgcgccatgctggtgcgcaagcgtgatcatttccgccagtggattttctgtgccaagcacgttggagacatgagtaattgccagcaggcgagttttctcatcaaacagcgtaggcagcgtctccagttgcaacgtaccatcgggattgagcgggatcacacgcagctctgcgccaacgcgtgcgcaaagcatctgccagggaacaatgttagcgtggtgctccatctgactgatgatgatgttatcgcccgcccgcacgttgctgttgccccagctattggcgaccagattgatcccttccgtcgtgccgcggacgaacaccagctcttccgcgctacgggcattaataaacaggcttgcccgcttgcgcacgttctccattttctcggtcgcctgggcgcttaaggtatgaataccacgatgcaccgccgcgtagccatgacgataaaactcggcctcggcgtcaatcacctggctcggtttctgcgcactggcggcgctgtcgagataagccagcggcaaaccgtttacctcacggctaagcaccggaaagtcggcccgcactttgtcgacggaaaaaatcatcttgcacctcctggcagccgttgaccgattcgggccagcacctgctgtttaagcccctcatcacgcagtgcttccgtcagttcggcagcgaaggcgtaaatgatcatctgctgggcatcctgctgattgatcccgcggctgcgcagatagaatatctgttcatcatcaatacgccccaccgtcgcgccgtggctgcatttcacatcatctgcatagatttccagctgcggtttcgtatccacttccgccagtttgcccatcagcagattgttgttggtcatctgaccatccgttttgatggcgtgctgcgcgacgttgatcaaaccgttaaataccgcgcggcctttgtcgctgacgatagttttgtgcaactgtcggctgttacaaaaacctttattgtgttccagccaggtacgggtatcacacacctcgtttttcaccggcatcgccaggctattgatccgcagcgtgctgttttcgccattgagttgcgtactggtgttgtgtcgtaacactgcgccacccagcaggaaactgtggctaaatgcggtggcatcctcagccagcaacaaatcgttatgagcaaagtggtgactgagcgggttttcaaacgccagcttgatatgctgcaagtgggcattcgctgcgacgttgatagtgaaccgtgccccggtaaaatgacgagcatcattcaggctgacaaaatgttcgatcaccgttgcttcggcaccttccgccagatccagatgatgtcggtaatgggcagtgttcacctcttcacctgccacgccctgggtgatatgcattaacagcaatggctttgccggccgttgaccgcgcttcacggcgatatgcgtcacgctttgtgccaggctttccgtcaaatgcagaaacacttccgcctgaatagcgtcgggtaaaccctgacggtcgtcgttaatgctcacttcatatccgctgccttcagttgcatcgctcagtgcgggcacgtaacgcccatcgacaaacaccagccgcacggagtctaacgttaacgctaaggcattacgctgctgtggggatatctctcccgcaatgctgacaaactggctattgatcagcccttccagcggcgtatatttccagttttcatgtttacgtgtcggcagtccggtacgcagcaattgttgtaaatgctgctgtgcttgcggggagcgttttgtcccttcagcttcaaacaagtgatgccactgttgcagcgcgttactgctgttcggtaagccagccataaccctgctcctccagttgtttgaccaacgtgaaatcgccggatttcacaattcgtccctgatatagcacatgaacgtaatcaggcttgatgtagtcgagaatgcgttggtagtgcgtaacaatgatgaaactgcgcttgccatcacgcaggctgttcacgccatcggcgaccacttttaatgcgtcaatatccagcccggagtcgctctcatcaagaatgcataactccggttccagcaccgccatttgcaaaatatcgttgcgctttttctcgccgccggaaaaaccaacgtttacgctacgggttaataaatcttccggcatcttcaggagagcgattttctcttccatcaaatcctgaaaatcaaagcggtcgagcgtttcctggccgcgatagctgcgcaccgcattaagtgccgtttgcaggaaaaactggttactgacacctggaatctccaccggatactggaaggccataaagatgccttcgcccgcgcgatcttccgggctcagcgcaagcaaatctttgcctttgaactcaaccgtgccgcccgtcacttcataatcttctcgcccggcaagcgttgcgcttaaggtacttttgccgctaccgtttggccccataatggcgtgaacttcgccgggatgaacgtcgaggcttaatccgcgcaggatagctttatcttccacgctgacgtgtaaatctttaatacttaacatgtttattccttatccgacgctgtgttcaagactgatggcgaggagtttttgtgcttcaacggcaaattccaacggcagctcgctgaacacgtctttgcagaaaccgttaacaatcatgctgatggcgtcttcttcgctgatcccgcgttgcaggcagtaaaacagttgatcttcaccaatacgacttgtcgttgcctcgtgttccagttgcgcactattgttacgacactcaacatacgggaaggtatgcgccccacaattagcgccaatcagcatactgtcgcactgagtgaaattgcgcgcattggttgccgtcggcatgattttcactaagccgcgataactgttctgactatgtccggcagagatccctttgctgataatggtgcttttggtgtttttaccgatgtggatcatcttggtgccggtatccgcttgctgatgaccgctggtcagcgccacactgtaaaactcaccaatggagttatcgccgcgcaaaatgcagctgggatatttccacgtaatcgcactcccggtttcactttgcgtccaactcattttgctgttttcgccttcgcacaaagcacgcttggtgacgaagttgagaataccgccggtgttgttatcgccaggaaaccagttttgtaccgtggaatatttcacctcggcgtttttatggatgatgacttccaccactgccgcgtgtaactgatagctgtcacgcaccggagcggaacagccttcaatgtagctgacgtagctgtcttcgtcggccaccagaatggtgcgctcaaactgcccggttttttctgcgttaatgcgaaaataggtggaaagttccatcgggcagcgcacgcctttaggcacataaataaacgtaccatcagaggctaccgccgcattaagcgcggcaaagaagttgtcattccccggcaccacggtgccgagatatttacgcaccagttccgggtgatcgtggatcgcctcaccaaaggaacagaaaataattccctgctccgccagtttttcgcgataagtagtggcaacgctaacactgtcgaaaatggcatccaccgccacctctttgccttcccgcacgggaacgcccaactgctcaaacgccgcctccacctctttacttaaaaaggcgttcgcgccagtttgctgcaccgcgccaggttcagacgcgcaagtgtcgtcacaattaccgcagcttggtgcactgtagtagctgtaatcctgataattcagcttgtcgtagtgcgctttcaaccagtgcggttcttccatctccagccatgcgcgataggcgtttagacgaaactccagcatccactccggctcattacgcttcgcgctaattgcgcgcaccacctcttcgtttatcccctttgccagctcatcggtggctaactgggtgaagaatccttctttataattcagcgggccgccggtccaggttttgacatcgtcagttgcttcagtattacgagacatagtaccgcttataccccaaagctttcgccacagccacattcattctgggctttagggttgtgaaatttgaatatctgattaagtccttcacgaacgaaatcgacttccgtgccatcaataaacggcatcgcttgcagcgggacaaacagcttcgcgccgtcgtgttcaaacagcagatcgtctttgtccggctcgctaacactgtcgagcacatagccaaagcccgcgcagcccgtttgcttcacgcctaagcgcacgccgaccatacccggctgctttgccaccagctcacggatgtgtatcgccgctgcgggtgtcagcgttaagccttgccaggcgaaatcttgtgggttaaaggttccactatgcatgtccatcgatttacctcacttcatcgctttcagcgtataacagcatgttagtgataatgattatcagttcaacccagcaaacgcaggggctttaccgtaaaacatgctttttgcctgcttttaataagcatagaccctgatgtgtgggttaacaggcacgctaagaattaggtatctcattgttagataatggttattatctaaggagcattaaggctgtgatgaaaaagaaaaagttgtattgaaaatgactatttaagagataggtaaaaaagtgcagcgttcagaaataagaaaacccttaagtctgtgcgacacaggcttaagggtttctaccccatccggcgcttatctccggcactctcagtggcttagctcttgaaggggcgataagaataatctcataaagctaacccgccgttttaacacaaactgcgattagtattatttttgaacaatatcaggcggtagataagcagtattaagaaggtcatcgaacctggacggaggttaatccaggtcgatttggcgaacttgcggcattaagtcaggatcaatgcacgcccagacgccaggcaaagtagatttcttcttttaattcagcagaagagagagtaagcaggtcagcaaattcaagttctagttgtttcagacgtttgagatattgggcaggactaagattgctctggtcacggcgtaaaaattcaatggccagctgggtgggatcaagttgagtagacatagcatcctcgcttttagacaagacctgcacagtataccaccgtttactgtgcagataatgaccaaaagcaatatgcgtcacacttttctggtgacaacgtcacaaaatggcggtcgtcaatcgactgctacagcacaaacgccctttctcatcgaagatttcaatctgccagacctggtgacggctaccgagatgcaacggtttgcatacgccgcgcacccgcccttctcgtgcgctgcggacgtggttagcattgatttccagaccaaccactttttgctcaccttcggtacataaataaccggcaacggaaccgatactttcggccagtaccacggatgctcctccatgcagcaacccgaaaggctgctttgtccggctgtctactggcattgtcgcttcaagggtgtcatcaccaatatgttcaaagcgaatatccaggaaccccaccatgtttccttcacccatagcattcagtgcttccagggtgattttccgtttccatatcatttaataatctccagtaaagcctgcacaggatggcgtacccccgtgccttcaacccgttttacctggctacggcaggaatatccggtcgccagacagcggttacgcggcagtcgctgcatagcctgatgccaggataactcatagatcccgaggctattttcatggtttttcgcttcatgtccgtaagtccctgccatgccgcagcaacccacgctgacattttccagtttcgcgccaaaacgggcaaatatcgcggcccattgtgctggcgcacccggcaaggcggtaacttcggtacagtgaccaaagaaataccaactttcaccgctgactgtagccactggctgactctcaagtgcgcttgccagccattcattcgccagtaagacgttaaactcgccacgctcctcgcccagcgccagtttatattcatcgcgataacaaagtaccagcgccggatcgacgcccaccattggcatacccagcttcgccatacggttgaggaaatccgccgtctttttcgccgtcttcgcaaaacgattaagaaaacctttaatatgctgggctttgccatttgggctaaatggcagtaacacaggctggaaacctaatttttcgaccagacggacaaaatccgccaccacttgcgcatcgtaatagctggtaaaggggtcctgcaccaccaacactgtgcgcgctttctgctctgcattgagagattcaagctgttccagcgtcatgtttgcgctgcgatgccccaccatttgttgttgtaggctggggacgctcagcagcggcaaatcaaccatgccgatatgtttttcgctgagtttgcgcaccagcggctggttaatgaagaagttaaaggttttcggcgcgcgtgccatcagcggcgcgtagctctcgaccgtagcgacgaggtggtcgcgcagcgggcgtaaataacgggtgtgatagagctgcagaaaacgagagcgaaactccggcacatcaattttgatggggcactgggtgctacacgctttacaggccagacagccgctcatcgcctctttgacttcgtgactgaagtcatattcgcctttattcgcatgccagctattgcgcgtgcgggcaattaacgtccgcaaactgacgccggattcaggcagttcttgttccagtttgagtggatcaacgccgcgatccgccaacaaacgcagccattcacgcaccagcgttgcgcgccctttcggactatgaatccggttctgggtgatcttcatgctcggacacatcggactacgggcatcaaagttgaagcataaaccgttgccgttacactccatcgcaccgcgccactgctggcgtaccgcaatggggatctgccgatcgaatgtaccgcgcttcaccgcgtccactttcatcatcggcgcatcgagaccttctggcgggcaaatcttccctgggttgagtcggttatgcgggtcaaatgccgctttcactttgcgcagttctgcaaaaagttcctcaccgaaaaacgccgggctgtattcagcgcgaaaacctttgccgtgctcgccccacaacaaaccaccgtatttcgcagtcagcgccaccacgtcatcagagatttgcttcatcaaaatctcttgttgaggatcgcacatatccagcgctggacggacgtgcaagacacctgcgtcgacgtgaccgaacataccgtagcttaagccgtggctgtcgagcagcgcgcgaaattcagcaatataatccgccaggtgttccggcggtacgcaggtatcctcagcaaacggaattggcttagcggcacctttggcattgccaagcagaccaacggcttttttgcgcattgcatagatacgttcaacccccgccagctcacggcacacctgccagccgatgacacctgcttgatgactggcgatcagctcatccaaccgcgcacagagtgcatttacccgctcatcaatcagcgcctcatcatcaccagcaaattccacaatgttcagcccgagcatctcttggtcaggcacatcggtaatcaactcgctgacggaatgccagacaatatcttcccgcgccagattcagcactttactgtccaccgtctctacgctaagcgcccgcgcctcaaccataaacggcgcgttacgcagcgcagagtcaaaagagtcatatttgacgttcaccagacggcgcactttaggcaagcgtgtaatatccagccgcgcttcggtaataaaggccagcgtcccttcactacccgtcagaatgcgcgtcaggtcgaactcggtcatctcatcgttaaagacatgacgcagatcgtaaccggtaagaaagcggttaagtttggggaagttgtcgataattaactggcgttgctgacggcaacgttgataaaccgtgttataaattcgcccgattgtggtattggatttacccagcgtttccgccaattcgacgggtaaaggttgcgtatcgagaatatcgccccccaacaacaccgcgcgtacgccaagtacgtgatcactcgttttgccatagaccaggcttccctgaccggatgcatcggtattgatcatcccaccgagcgttgcccggttgctggtgctaagttccggcgcaaaaaagtagccgaacggtttcaggtactgattgagttgatcttttatcaccccggcctcaacgcgcacccagccctcttcagggttaatttcgatgatgcggttcatatggcgggacatatcaacaataatcccctggttgagcgcctgaccgttagtgccggtgccgccgccgcggggggtaaagatcaggctactatagcgttcctgcgcggcaagacgggcgatcagcgccacatctgcggtactacgcggaaataccaccgcatcggggagaagttggtaaatactgttgtcggtgctcattgtcagacgatcggcataacttgtcgccgtatcgccggtaaaaccttgttgctccagctcttgcaaaaaattaagcaccagttgaacgacgccgggtgcctgggaaatctgtggaatcattatattgaccctttcctgcggtctgtgatgtaggtcgatacactattctttcaggctgctgcaatagcgcactgaaaggtgatgtttgtttactctatggatttcgtgttgcaggaaggcggcaagcgagtgaactccaggagcttacaatagtaagtgactggggtgaacgaacgtagccgcagcacatgcaacttgaaatacgacgagtaaatcgtttgcgtgttgcctgagttgttgtaccacatttttttctaacacgcccatcagaattaagggcagaatcggcctgttaaaaaccgctgaaattgctcatcattatgcaggtgagtttcgcgtgttcacgtcgcgtcgacgatttgacgcacaaaaaaggtgaaaagtagttatggtaaatgttcgtcagcccagggatgtcgcacaaattctgcttagcgtgctgtttttagccatcatgattgtggcatgtctgtggattgttcaaccctttattctcggctttgcatgggccggtacggtggttatcgccacctggccggtattgttacgtttgcaaaagatcatgtttggccgccgctctctcgccgttctggtgatgacgctgttattagtgatggtgtttatcatccctattgctttgctggttaacagtatcgtcgacggcagcggcccgctaattaaagccatttccagcggtgacatgacgttacccgatctggcgtggcttaataccattccggtgattggcgcgaagctgtatgcaggctggcacaacttgctggatatgggggggacggcgatcatggcgaaagtccgcccttatattggcaccaccaccacctggttcgttgggcaggcggcgcatatcgggcgctttatggtgcattgtgcgctgatgcttctcttcagtgccctgctgtactggcgcggtgaacaggtggcacaaggcattcgccattttgcaacccgtctggcaggcgttcgcggagatgccgccgtgctgctggcggcacaggctatccgcgcggtggcgctgggtgtggtggtgacggcgttagtacaggcagtgcttggcggtatcggcctcgccgtatccggcgtaccttatgcaacgttgctaacggtgttaatgatcctctcctgccttgtccagcttggcccgttgccggtactgattccggcgattatctggctctactggactggcgataccacctggggaacggtattgttagtgtggagcggtgtggttggcacgctggataacgtcatccgcccaatgttaattcgcatgggtgccgatttaccgctgatcctgattctctctggcgttattggtggtttgattgctttcgggatgatcggtctgtttattggtccggttctgttagccgtttcctggcgtctgtttgccgcgtgggtggaagaagtcccgccgccgacggaccaaccggaagaaattctcgaagaacttggcgaaatcgagaaaccgaataagtaatttctcatcaggcggctctgccgcctgattgttaaccaccgctaattgatatttgcttgctcttccccatattttcctgcttaccgccattcagctggtagtacctgtcgcaaattctttacagtttttaaactaatgagacgaatctgatcgacgcaaaaagtccgtatgcctactattagctcacggttataaatcaacatattgatttataagcatggaaatcccctgagtgaaacaacgaattgctgtgtgtagtctttgcccatctcccacgatgggcttttttttaacatttttccgcttcgctacctcgcccctcactctttccaataatgttgcacaagatactgtgactctcttcaagccgtcagcaggctgataatgttatttatattttattgtttatttcatgcagccattacacgatgaacgcttatgaactccaggcactccgccatatttttgccatgactattgatgaatgcgcgacctggattgcccagaccggtgacagtgaaagctggcgtcagtgggaaaatggcaagtgtgccattcctgatcgtgtagtcgagcaactgttggctatgcgtcagcaaagaaaaaaacatcttcatgccatcatagagaaaataaataaccgcatcggcaacaacaccatgcgttttttccccgacttaaccgcatttcaacgagtctaccctgatggcaattttattgactggaagatctatcaaagcgtagctgctgaattatatgcacacgatctggagcggctttgttaatttttccacagaaaggaattgtcgttgttacaacaataatgaacggatgctgacacaacatcgcttcactttttaaagcacctttgctaagtagaacctatgaaaaatccctatttccctaccgcacttgggttgtattttaattacctggtgcatggtatgggcgtccttttgatgagcctgaatatggccagcctggagacactttggcagactaatgccgcgggtgtcagcatagttatcagtagcctgggcattggtcgattaagtgtcttgctttttgcaggattattatccgatcgctttggtcgccgcccttttatcatgctcgggatgtgctgctatatggccttcttttttggcatcctgcagaccaataacatcattatcgcttatgtttttggctttctggcgggaatggcaaacagttttctcgatgcaggcacttatcccagtttgatggaagcttttccacgcagtcctgggacagccaatattttaattaaagcatttgtttccagcggacaatttttattaccgctaatcattagcctgttagtgtgggctgaactgtggttcggttggtcctttatgattgctgcaggcattatgtttattaacgctctgtttttataccgttgtacgttcccaccccatccgggtcgtcgcttacctgtcataaagaaaaccaccagctctacggaacatcgctgtagtattatcgatttagccagttataccttatatggctatatcagtatggcaacgttttatctggttagccagtggctggcacagtacggacaatttgttgcaggcatgagttacactatgagcatcaaactactcagtatctacaccgtgggtagcctgctttgtgtatttattaccgctccactcattcgtaataccgttcgcccaacaacattactgatgctgtacacctttatcagttttattgctctgtttaccgtctgcctgcatcccacattttatgtggtgataatatttgcttttgtcattggttttacctctgctggaggtgttgtgcaaattggcctgacgttaatggctgaacgtttcccttacgctaaaggtaaagctacagggatctattacagtgcgggcagtattgcgacctttactattccgttgattacggctcatctgtcccaaagaagtattgccgatattatgtggttcgataccgccatcgctgccatcggttttttactggcactgtttatcggcttacgcagccgcaaaaaaacgcggcatcacagcctaaaggaaaatgtcgctccgggtgggtaatgcaatattcttttcaggtcatgcaagatcttacggataaataactctttctgcgctaactaaggaaaatcgcgatcaaaaacaaactatgacatgcaatattcctggaaacataaactttatgccatgtacccagggaaaatcatcttcagtatagtaattatgtaaaccgtcggagaacaatacgtacggtaacgaaattatctttcagcaaggagctgtgaaaatgtctcaaaataaggctttcagcacgccatttatcctggctgttctttgtatttacttcagctacttcctgcacggcattagtgttattacgcttgcccaaaatatgagttctctggcggaaaagttttccactgacaacgcgggcattgcctacttaatttccggtatcggtttggggcgattgatcagtattttattcttcggtgtgatctccgataagtttggtcgtcgggcggtgatattaatggcagtaataatgtatctgctattcttctttggtattcccgcttgcccgaatttaactctcgcctacggtctggcagtgtgcgtaggtatcgctaacagtgcgctggatacgggtggctaccccgcgctcatggaatgctttccgaaagcctctggtagcgcggtcatactggttaaagcgatggtgagttttgggcaaatgttctacccaatgctggtgagctatatgttgctcaataatatctggtacggctatgggctgattattccgggtattctatttgtactgatcacgctgatgctgttgaaaagcaaattccccagccagttggtgggcgccagcgtaactaatgaattaccgcaaatgaacagcaaaccgttagtctggctggaaggtgttagtagcgtactgttcggtgtagccgcattcagcaccttttatgtgattgtggtgtggatgcccaaatatgcgatggcttttgctggtatgagtgaagctgaggcattaaaaaccatctcttattacagtatgggcagcttggtctgtgtctttatttttgccgcactactgaaaaaaatggtccggcccatctgggctaatgtatttaactctgcactggcaacaataacagcagccattatctacctgtacccttctccactggtgtgcaatgccggagcctttgttatcggtttcagtgcagctggcggcattttacagctcggcgttagcgtcatgagtgagttttttcccaaaagcaaagccaaagtcaccagtatttatatgatgatgggtggactggctaactttgttattccactgattaccggttatctgagcaacatcggcctgcaatatatcattgttctcgattttactttcgcgctgctggccctgattaccgcaattattgtttttatccgctattaccgcgttttcattattcctgaaaatgatgtgcggtttggcgagcgtaaattttgcacccggttaaacacaattaagcatagaggttaaaggagttaattatggatgttaccgcaaaatacgaattgattgggttgatggcctatcctatccgccacagtttaagccccgaaatgcagaataaagccttagaaaaagcgggattgccatttacctatatggccttcgaagtggataacgatagctttcctggagcaattgaaggattaaaagccctcaaaatgcgcggaactggtgtaagcatgccgaacaaacaactggcgtgtgaatatgttgatgaattaacaccagctgccaaactggtgggggccatcaacaccatcgttaatgatgatggctatctgcgtggctataacaccgacggcacgggccatattcgcgccattaaagagagcggttttgatatcaaaggcaaaacgatggtgctgttaggggccggtggtgccagtacggcaattggcgcgcagggggcaattgaaggtttaaaagaaattaaactctttaaccgtcgggatgagttcttcgataaagccctcgccttcgcgcagcgggttaatgaaaacaccgattgtgtcgtcacggtcaccgatctcgccgatcagcaagcctttgctgaagccctggcttccgccgacattttaaccaatggcacaaaagtgggtatgaaaccccttgagaatgaaagtttggttaatgatatcagtctgttacatccgggacttctggtcactgaatgcgtgtataacccgcatatgacgaagttattgcagcaggcgcaacaagctggttgcaaaacgattgatggatacggcatgttgttgtggcaaggggctgaacagttcacattatggactggcaaagatttccctctggaatatgttaaacaggtcatggggttcggtgcctgacaggctgaccgcgtgcagaaagggtaaaaaatgaaaaccgtaactgtaaaagatctcgtcattggtacgggcgcacctaaaatcatcgtcagcctgatggcgaaagatatcgccagcgtgaaatccgaagctctcgcctatcgtgaagcggactttgatattctggaatggcgtgtggaccactatgccgacctctccaatgtggagtctgtcatggcggcagcaaaaattctccgtgagaccatgccagaaaaaccgctgctgtttaccttccgcagtgccaaagaaggcggcgagcaggcgatttccaccgaggcttatattgcactcaatcgtgcagccatcgacagcggcctggttgatatgatcgatctggagttatttaccggtgatgatcaggttaaagaaaccgtcgcctacgcccacgcgcatgatgtgaaagtagtcatgtccaaccatgacttccataaaacgccggaagccgaagaaatcattgcccgtctgcgcaaaatgcaatccttcgacgccgatattcctaagattgcgctgatgccgcaaagtaccagcgatgtgctgacgttgcttgccgcgaccctggagatgcaggagcagtatgccgatcgtccaattatcacgatgagcatggcaaaaactggcgtaatttctcgtctggctggtgaagtatttggcagcgcggcaacttttggtgcggtaaaaaaagcgtctgcgccagggcaaatcagcgtaaatgatttgcgcacggtattaactattttacaccaggcataagcaataatatttcggcgggaacaccctccccgccgaactaaaaaatatattcaatcgtatttaataaaaatatttcgtgagtctctgtgcgctaattctccatttggcgtagggaaaatcacatctgaatcaggaattaacaatgaaacctgtaaaaccacctcgtattaatggacgagtgccggtcctgagcgcacaggaagcggtgaattatattcccgacgaagcaacactttgtgtgttaggcgctggcggcggtattctggaagccaccacgttaattactgctcttgctgataaatataaacagactcaaacaccacgtaatttaagcattattagtccaacagggcttggcgatcgcgccgaccgtggtattagtcctctggcgcaagaaggtctggtgaaatgggcattatgtggtcactggggacaaagcccgcgtatttctgaactcgcagaacaaaataaaattattgcttataactacccacaaggtgtacttacacaaaccttacgcgccgccgcagcccaccagcctggtattattagtgatattggcatcgggacatttgtcgatccacgccagcaaggcggcaaactgaatgaagtcactaaagaagacctgattaaactggtcgagtttgataacaaagaatatctctattacaaagcgattgcgccagatattgccttcattcgcgctaccacctgcgacagtgaaggctacgccacttttgaagatgaggtgatgtatctcgacgcattggttattgcccaggcggtgcacaataacggcggtattgtgatgatgcaggtgcagaaaatggttaagaaagccacgctgcatcctaaatctgtccgtattccgggttatctggtggatattgtggtggtcgatccggatcaaacccaactgtatggcggtgcaccggttaaccgctttatttctggtgacttcacccttgatgacagtaccaaacttagcctgcccctaaaccaacgtaaattagttgcgcggcgcgcattattcgaaatgcgtaaaggcgcggtggggaatgtcggcgtcggtattgctgacggcattggcctggtcgcccgagaagaaggttgtgctgatgactttattctgacggtagaaacaggtccgattggcggaattactagtcaggggatcgcctttggcgcgaacgtgaatacccgtgccattctggatatgacgtcccagtttgatttttatcacggtggcggtctggatgtttgttatttgagttttgctgaagtcgaccagcacggtaacgtcggcgtgcataaattcaatggtaaaatcatgggcaccggtggatttattgatatcagtgccactagcaagaaaatcattttctgcggcacattaactgcgggcagtttaaaaacagaaattaccgacggcaaattaaatatcgtccaggaaggacgggtgaagaaatttattcgggaactaccggaaattactttcagcggaaaaatcgctctcgagcgagggctggatgttcgttatatcactgagcgcgcagtattcacgctgaaagaagacggcctgcatttaatcgaaatcgcccctggcgtcgatttacaaaaagatattctcgacaaaatggatttcaccccagtgattagcccagaactcaaactgatggacgaaagattatttatcgatgcggcgatgggctttgtcctgcctgaagcggctcattaacaggagtataatgatggatttttctttaactgaagaacaagaactgctgctggccagtattcgcgaactgattacgactaactttccggaagagtatttccgcacctgcgatcaaaacgggacatatccgcgtgagtttatgcgggcgctggcggataacggtatttccatgcttggcgtgccggaagaatttggtggtatccctgcggattacgtcacccaaatgctggcgctgatggaagtgagtaaatgcggtgctccggcatttttaattaccaacggtcaatgtattcacagtatgcgccgtttcggttctgcagagcagctacgtaaaacggcagagagcaccctggaaacgggtgatcccgcctatgccctggcgttgacggaaccaggtgctggcagtgataacaacagtgccactaccacttacacgcgtaaaaacggcaaggtctacatcaacggacaaaaaacctttattaccggtgcgaaagagtacccgtatatgctggtgctggcgcgcgatccgcaaccgaaagatcccaaaaaagccttcaccctgtggtgggtcgactccagtaagcccggcattaagattaacccgctgcataaaatcggctggcatatgctcagcacctgcgaagtctatctcgacaacgtggaggttgaagagagcgacatggtgggcgaagaaggaatgggtttcctcaatgtgatgtacaactttgagatggagcgcctgatcaacgccgcgcgcagcaccggctttgccgaatgcgcctttgaagatgccgcccgctatgccaaccaacgtatcgcttttggtaagcccattggtcataaccagatgatccaggaaaaactggcgctgatggcgattaagatcgacaacatgcgcaacatggtgctgaaagtggcatggcaagccgatcagcatcagagtctgcgcaccagcgcggcgctggcaaaactgtactgtgcacgtaccgcaatggaagtcattgatgatgcgattcaaatcatgggcggtctgggctataccgatgaggcgcgcgtctcccgcttctggcgtgatgtccgttgtgaacgtatcggcggcggtacagacgaaattatgatttacgtagcaggtcggcagatcctgaaagactatcagaacaaataatctgcaggcggcgcagcttcttaacaaactgcgccgccagatttatccaacaagacttaccggttgaggaaattcagataggatttcttgttccgcaaaacagtttttaaattgtctacggtaatcgctggggctacaaccgacatggcgcaaaaacagtttggcaaagtgatcgacattttcataacccacacgccaggagatctctgcctgacttaattcagtattagtgagactccattttgcttccgtcatacgccgttgaataacatagttaataggggaaatacgatactctttggtaaattcatggcaaatataactgacgctggcacgaaattttttgcttaactgttctaaagtgattttttcgcgataattattattcagatagaaaagaatatcttttatcagaacatcttttttaatatacccctgctcgctacgataagcatttttaaaattttcgtagtaaagaatggctaacgtataggcaaatgcatcccataagctagatgtttggctatttttactttgcggcaaaatcacacttagctcattaaataaggtttttatgacttcttttccctgccccgcggcaattaccggacaagaatgcggttgcagtagctgattttcctcagccccctgaaactgaaagccgtacagcgcacaggtacacgtcgttgccggatcgttaacgtcagaggccaccgcatgcagcctgccgcgttctatcaccacaatgtcatccgcatgtgcgacatataagctagaatcgatggtaaaccttgcaacccctttcttgacgtaaatcaactcggtttcattgtcatgaacgtgatgtccggactcccattttggatcatcgctaaatgcaaaacgactaagccgtggcgttttaccggcgacaaacagcgtttcactggcgttatcaaaacagcgttgatacatgacaacctccctattccatgagcaagcaaaaacaatatatgccggataaaatacggcgtgtattgcggttatacaaccgcgtttagcgagagctaaacaagattatttacactgaatgcaagattgtacggtcatggaataactatattgccgcaaattgcacttttgttttagcgatcgcattttttttgcaagattgttggcaaggaaaacagcttgctccgtcgaaaaccccgcaccgctatcgcacactattttcaggccatttttaccttccatcggagatggttccgtatgcgactcacaggagaaatcatgaaaataataacctgctttaagctggtgcctgaagaacaggacattgttgtcactccagaatacaccctgaatttcgacaatgccgacgccaaaatcagccagttcgatctcaatgccattgaagctgcaagccagctcgcaacagatgacgatgagatagccgcgctgaccgttggcggcagtttgttgcagaacagcaaagtgcgcaaagacgtgctatcccgcgggccgcacagcctgtatttggtgcaggatgcgcaacttgaacatgcactgcctctcgataccgcaaaagcgctggcggcagcaattgaaaagatcggcttcgatttactgatctttggtgaaggttccggcgacctttatgcccagcaggttggcttgctggtcggagaaattctgcaacttccggtgattaatgcagtgagtgctattcagcgtcagggcaatacactggtgattgaacgcacgcttgaagatgatgttgaagttattgaactctctgttccagccgtgctctgcgtcacctccgatattaacgtgccacgcattcctagcatgaaagccattctcggcgcgggtaaaaaaccggtaaatcagtggcaggcaagtgatattgactggagccagagcgcgccacttgctgaactggtcggcattcgcgtaccgccgcaaacagaacgtaagcacatcattatcgataacgatagcccggaggccattgccgagctggcggaacatctgaagaaagccctgaactgaagcctacggagaagaaacgatgagtcaattaaacagcgtctgggtctttagcgataatcctgaacgttatgctgaactgtttggcggcgctcagcaatggggccaacaggtgtatgccattgtacaaaataccgaccaggcgcaggcagttatgccttatggtccaaaatgtctttatgttcttgcgcaaaacgacgcgctgcaacgcactgaaaattacgccgaaagcattgctgccctgctgaaagataaacaccccgctatgttgctgttggccgcgacgaaacgtggtaaagcgctggcagcacggttaagtgtgcaactgaatgcggcgctggtgaacgatgccacggcggtggatattgtcgatggtcacatttgcgccgaacaccggatgtatggcgggttagcgttcgctcaggaaaagatcaacagcccgctggcgatcattacccttgcacccggtgttcaggaaccgtgcaccagtgatacctctcatcagtgcccgacagaaacggtaccttatgttgctccgcgtcatgaaattctctgtcgcgaacgccgtgcgaaagccgcaagcagcgtggacctgagcaaagcaaaacgtgtggttggcgtcggtcgtggactggcggcgcaggatgacctaaaaatggtccacgaactggcggcggtgctgaatgctgaagtcggctgtagtcgtccaattgccgaaggcgagaactggatggagcgtgaacgttatatcggtgtctccggcgtgttgctgaaatccgatctctacctgacgctggggatctccgggcagatccagcatatggttggcggcaacggcgcaaaagtgattgtcgccatcaataaagataaaaatgcgccaatcttcaactatgccgactacggtctggtgggcgatatctacaaagtcgtccctgccctgattagccagttgagccgctaattcccctttcaaccacatctcccgctgtaaacgcagcgggaagggagcataacgcatgagcgatgacaaatttgatgccattgtggtcggtgcgggcgttgctggtagcgttgccgcactggtcatggcacgagccgggctggatgtcctggtgatagaacgcggcgacagtgccggatgtaaaaacatgaccggcgggcgtctttatgcccacacacttgaagcaatcattccaggctttgcagtaagtgcgccggtagaacgcaaggtcacacgcgagaaaatctccttcttaaccgaagaaagcgccgttaccctcgattttcaccgcgagcagccagatgttccgcaacacgcatcttataccgtattgcgtaatcgtctggacccgtggttgatggaacaagccgagcaggcgggcgcgcagtttatcccaggcgttcgcgtcgacgcgctggttcgtgaaggaaacaaggtcactggcgtgcaggctggggatgatattctcgaagcgaatgtggtgattctggctgatggcgttaacagcatgcttggccgcagcctgggaatggttcccgcttccgatccgcatcattacgctgttggtgttaaagaggttattggcctcacaccagaacagatcaacgatcgctttaatattacgggcgaggaaggtgccgcctggctgtttgccggttccccttctgacggcctgatgggcgggggatttctctataccaacaaggattccatatccttggggctggtttgtggattgggtgatatcgcccatgcgcaaaaaagcgtgccgcaaatgctggaagattttaaacaacaccccgccattcgcccgctgattagcggcggcaaactgcttgaatattccgcgcatatggtgccggaaggcggtctggcaatggtgccgcaactggttaacgagggcgtgatgatcgttggtgacgccgcaggcttctgcctgaatttgggttttacggtccgcggcatggatttagccatcgcaagcgctcaggctgccgccacaacggtgatcgccgccaaagaacgcgcggatttctccgccagcagtctggcgcaatacaaacgtgagctggaacaaagctgcgtcatgcgtgatatgcagcattttcgcaagatcccggcgctgatggaaaacccgcgcctgtttagccaatacccacgaatggtagccgacatcatgaacgagatgttcaccatcgacggcaaaccaaaccagccggtacgaaaaatgatcatgggacatgcgaagaaaattgggctgatcaacttgctgaaagatggcattaagggagcaaccgcgctatgagccagaacgctacggttaacgtcgacatcaaattaggcgtcaataaattccatgttgatgagggccacccgcatatcattctggcggaaaatcccgatatcaatgaattccataaattaatgaaagcctgccctgccggactttataagcaggatgacgcaggaaacattcattttgattccgccggttgtctggagtgcggcacctgtcgggtgctgtgcggtaacactattctcgaacagtggcaatatcccgcaggcaccttcggtattgattttcgctacggctaatcatgcatcccacaggcccgcatctcgggcctgatgttctgtttcgagagtccaacatgaaagtgacattaacgtttaacgaacaacgtcgtgcggcgtatcgtcagcaagggttatggggcgatgctagcctggccgattactggcagcagaccgctcgtgcgatgccagacaaaattgccgtggtcgataatcatggtgcaagctacacctatagcgcgctcgatcacgccgcgagctgtctggcaaactggatgttagcgaagggtattgaaagtggcgatcgcatcgcatttcaactgcctggctggtgtgaatttaccgttatctatcttgcctgcctgaaaatcggtgcagtttccgtgccgctgttgccttcctggcgggaagcagaactggtgtgggtgctcaataagtgtcaggcaaaaatgttctttgcaccgacgttgtttaaacaaacgcgtccggtagatttaatcctgccgctgcaaaatcagcttccacaactacaacaaattgtcggcgtggacaaactggctcccgccacctcttccctcagtttaagtcagattatcgccgacaataccagtctgaccacggcgataacgacccacggcgatgaattagctgcggtgctgtttacctccggaaccgagggtctgccaaagggcgtgatgctaacgcataacaatattctcgccagtgagcgggcttattgcgcgcgactgaatctgacctggcaggatgtctttatgatgcctgcgccacttggtcacgcaacgggctttctgcatggcgtaacggcaccattcttaattggcgctcgcagcgtgttgttagatattttcactcctgatgcgtgtctcgcgctgcttgagcagcagcgttgcacctgtatgctcggcgcaacgccgtttgtctatgatcttttgaatgtactagagaaacaacccgcggaccttagtgcgctgcgtttctttctttgcggcggaaccacaatccccaaaaaagtggcgcgtgaatgccagcagcgcggcattaaattattaagtgtttatggttccacagaaagtagcccgcatgcggtggtgaatctcgatgatcctttgagccgctttatgcacaccgatggttacgctgccgcaggtgtagagattaaagtggtcgatgacgcacgcaagaccttaccgccaggttgcgaaggtgaagaagccagccgtggcccaatgtgtttatggggtattttgatgaacctgaattaaccgcccgtgccctggatgaagaaggctggtattacagcggcgatctctgccgtatggatgaggctggctatataaaaattaccggacgcaaaaaagatattattgtccgcggcggcgaaaatattagcagccgtgaagtggaagatattttattgcagcatcctaaaattcacgatgcctgtgtggttgcaatgtccgatgaacgtttaggtgaacgaagttgcgcttatgtcgtgctgaaagcgccgcatcatagtttaagcctggaagaggtagtggctttttttagccgtaaacgggtcgcaaaatataaatatcctgaacatatcgtggtaatcgaaaaactaccgcgaactaccagtggtaaaatacaaaagtttttgttaagaaaagatattatgcggcgtttaacgcaggatgtctgtgaagagattgaataagtttcatcttcggggatcacataaccccggcgactaaacgccgccggggatttattttatttcttcagttcagccaggcttaaccaggtttgcaccacggtgtccgggttcagagacaggctatcgatcccctcttccatcaaccatgcggcaaagtcttcgtggtcggacggaccctgaccgcaaatcccgacatatttgccctgtttcttcgcggcacggatagccatgctcagcagtgctttcaccgcatcgttgcgctcatcgaacaattcagacaccacgccggagtcacggtccagaccgagcgccagctgcgtcatatcgttactgccaatactgaagccgtcgaaatattcgaggaactgctcggccagcaaggcgttggacgggatttcacacatcatgatgattttcagcccgttctcgccacgtttcagcccctgacgcgccagttcttcaaccaccgctttcgcctgatctacggtacgcacgaacgggatcatgatctcaacgttggtcagtcccatgtcgttgcgcacacgtttcactgcttcacactccagcgcgaaacagtcgcggaagctgtcggaaacatagcggcccgcgccacggaagccgagcatcgggttctcttcatctggctcgtaacgctcaccaccgaccaggttggcatattcgttgcttttaaaatcagagagacggacaatgacgcgcttcggataaaacgcggcacccagcgtcgcgatcccttcagtcagacgaccaacgtaaaattcacgcggagaatcaaaacctttcatcatctcgcggatttcgttttgcaactgcggttcctgatcgtcaaactcaagcagtgcgcgtgggtggacgccaatcatacggttgatgataaattccagacgcgcaaggcccacgccttcgttcggtaggcaggcgaagtcgaaagcacggtccgggttaccgacgttcatcatcactttcaacggcagatccggcatcgtttctacgctggagcttttcacgctaaattccagcaactccgcatagacgtaaccggtatcaccttcggcacaagaaacagtgacgttctcaccgtctttcatccgttctgttgcatctccacagcccactaccgccggaatgcccagttcacgagcgatgatcgccgcgtgacaggtacgaccgccacggttggtgacgatggcagatgctttcttcatgatcggttcccagtccgggtcggtcatgtcagtaaccagcacgtcgccaggttcgatgcggttcatttcgctgatgtcatggatgactttcaccggacccgcaccgatgcgatgaccgatagcacggccttcggcgataatcttaccctgactatgcagcgtataacgctccatgacctgaccgcgactgcgcacggtttccggacgcgcctgcacaatgaacagtttaccggtgtggccatctttcgcccactcaatatccatcgggcgaccgtagtgtttctcaatttgtacggcctgttttgccagttcctgcacttcttcgttggtcaggctgaagatgtcacgctgttcctgcggtacgtcttcgattttaacctgcttgccgtgctcctgggtcggcgcgtaaaccatgcggatttttttgctccccatggtgcggcgcacgatagccgggcgattcgccgccagtgtcggtttatgcacgtaaaactcatccgggttaaccgcaccctgcacgaccatctcaccaaggccccatgcggaagtgataaacaccacctggtcaaagccggattcggtatcaatggagaacatcacgccagaacttgcgaggtcagagcgcaccatccgttgaacaccggcggagagcgccacaccacggtgatcgtaaccctggtgcacacgataagagatggcgcgatcgttaaacagagaagcaaatacatgtttcactgccacgagaacggcgtcaaaaccctgaacgttgaggaaggtttcctgctgaccggcaaaagaagcgtccggcatatcttctgcggtggcggaggagcgcaccgcaaaagaggcgttttcgtcatcggcggaaagctgtgcataggcttcgcggatggcgttttccagctcaggctggaagggagtgtcgataatccactggcggatttgcgcgcccgctttcgcaagctgagtaacatcgtcaatatccgttttatccagcagttcataaatgcgctggtttacgccgctttggtccagaaactggttaaacgcgtcggcggttgtggcgaaaccattcggaacggaaacacccattccggaaagattagtaatcatttcacccagggaggcatttttgcccccaaccctgtctacatcattcatgccgagttggttataccaaagcaccagcggactgctgccattgttggacatcgaacaatccttttgtgataaatgaacggtttgagaaacacatttctgcgcatttatctttgcatatttaaccggatgaaaaaaacggtgaatcgttcaagcaaatatatttttttactttttaagactgatcccagcgttgcgcaaatctgctctcttcgacaatttccacataaaccatcggtataaacgaaaccataaaaatgaaatgctgttttcataaaaaataaaattgaaggttcattttataaaccagacataacgttctacgcttctgtgcgtttttaatttatgctttcatagaattatgtctgcatcacgggaagaacaaaatggataatgctgttgatcgccacgttttttatatttctgatggtacggcaataactgcggaggtattaggacacgcagtaatgagtcaatttcccgtcactatcagcagcatcacgctgccgtttgtcgaaaatgagagccgtgcacgggcagtgaaggatcagattgacgcaatttatcaccagacaggcgtgcgcccgctggtcttctactccatcgtgttgccggagattcgcgccatcatcttgcaaagtgaaggcttttgccaggatatcgttcaggcgctggttgccccgctacaacaagagatgaaactggatccaacgccgattgctcatcgtacccatggccttaaccctaataatctcaataaatatgatgcgcgcattgcggcgattgattacaccctcgcccacgatgacggcattagcttgcgcaatctggaccaggctcaggtgatcctgctcggtgtttctcgctgtggtaaaacccccaccagtctgtatctggcaatgcagtttggtatccgcgcggcaaactacccctttattgccgacgatatggataatctggtgctacccgcgagcctcaaaccgcttcagcataaattgttcggcctgactatcgacccggaacgtctggcggcgattcgcgaggaacgtcgggagaacagtcgctatgccagccttcgtcagtgcaggatggaagtcgcggaagtggaagccttgtaccgtaaaaatcagatcccgtggattaacagtaccaattatagcgtagaagagattgccaccaagatcctcgatatcatgggccttagtcgccgaatgtactaaagaactagtgcattagcttatttttttgttatcatgctaaccacccggcgaggtgtgacacacctcgcacttgaaatcagcagcgattggtttatcgtgatgcgcatcacttcccggcagtcctgccgtagaagcaacaaatttctgagacttgtaatgaacagaactgacgaactccgtactgcgcgtattgagagcctggtaacgcccgccgaactcgcgctacggtatcccgtaacgcctggcgtcgccacccatgtcaccgactcccgccgcagaattgaaaaaatactgaatggtgaagataagcgactgttggtcattattggcccctgcagcatccacgatctcaccgctgcaatggagtacgccacccgtctgcagagcctgcgcaaccagtaccagagtcggctggaaatcgtaatgcgcacctattttgaaaaaccacgaactgttgtcggctggaaaggactaatctccgatccagatttaaacggcagctatcgggtaaatcacggtctggagctggcgcgcaaattacttttacaggtaaatgagctgggcgtcccaaccgcgaccgagttcctcgatatggtgaccggtcagtttattgctgatttaatcagttggggcgcgattggcgcacgtactaccgaaagtcagatccaccgcgaaatggctagcgcactctcctgtccggtaggtttttaaaatggtaccgatggcaatacgcggattgctgtggatgctatccgcgcagcccgcgccagccatatgttcctcagcccagacaaaaatggtcagatgaccatctatcagaccagcggcaacccgtatggccacattattatgcgtggcggcaaaaaaccgaattatcatgccgatgatatcgccgcagcctgcgatacgctgcacgagtttgatttacctgaacatctggtggtggatttcagccacggtaactgccagaagcagcaccgtcgccagttagaagtttgtgaggatatttgtcagcaaatccgcaatggctctacggcgattgctggaattatggcggaaagtttcctgcgcgaaggaacgcaaaaaatcgtcggcagtcagccgctcacttacggtcaatccattaccgacccgtgtctgggctgggaggataccgaacgcctggtcgaaaaactcgcctctgcggtagatacccgcttctgaatgcgtgcccattcctgacggaatgggcatttctgcgcaacttgttgtcttctcaacaaattactgcttgctctggtcagccataatattgataataagaatcattgttatatcaattattattaatttttatgcgttatacggatagcagaaaactcacgcctgaaacggatgccaatcacaagaccgcttccccgcagcctattcggcgaatttccagccagacactgttaggtccggatggcaaactgattatcgatcatgacgggcaagaatatctgctccgtaaaactcaggctggcaagctgctgttgaccaagtaacctttaactgctgcagctgacttccagccgtttaccccagtcaggtggacgactgacatagtcatcatctctgtcgctgaaaggatttcgcaacgcctcatgcaggcggtgcaattccgtcatatcacccttttctgccgcttcaatcgcccgttgcgccaaccagttgcgcaataccagagcggggttaacgctttgcatcagttgctgacgctcactatcgctaacctcgtcttgttgcaaacgcccccgataacgggcaaaccagtcatcaaatgccgcacgatcaataaactcatcacgtagcggactcgccgcgctgtgctgctcggtcagactcagcatgcggaatgtgcgggtataatcgctgcgctctcgcgccatcagactgaataattcattcagtagcgcgttatcctctttttgctccgtcatgaagcccagtttctgccgcatccgttctccataatgcgtcaacaaaacctgctgatagctgtccagggcctcattcagggcatctacggcaacaaatgggctcaatgtctgcgccagacgctgtaaattccacaacgcgacggcaggttgattatcaaagctgtaacgcccttgatgatcgctgtgattacaaataaaaccgggttcgtaatcatcaagaaaaccaaacggcccgtaatcaagcgtcagccccagcaggctcatgttgtcggtattcatcaccccatgagcaaagccgaccgtctgccattgggcaattaagctcgcggtacgtgcgacaacatcgctaaaccagagacggtatttgtcctcatcatctgcaagatgactccagtaatgacgaatagcaaagtcagctaactgacgaaccttttcgctctcgcggcggtagtaaaaatgttcgaaatgaccaaagcgcagatgacttggtgccacacgcatcagcatcgcgcctggctccgccgtttcccgatacactgggctatcgctggtgacgatacttaacgcgcgggtcgtcggaatgcccagataatgcatcgcctcactggcgagactttctcgtatcgtgctacgtaaaaccgcccgtccatcacccattcggctataaggcgtcaggccagcacctttcagatgccagtccattgtagtgccatcagcaagcagttgttcgccgagtaaaatgccgcgcccatcacccagttggcccgcccagacgccgaactgatgaccactgtaaacctgcgccagtggactcataccaggcagtagggcttcgccgccccagacacctgcgccatttttaaacaggctgcttggaatactcagcgtgttagccagttcggtattatgccaaatcagccgggcattatttaaaggcgtaggggaaagtgctgtataggtttctggcaattcatcgcgccagcgggtaacaaaagacagggtcatagatcctcctgtttgatagtgtagacggttactctcgtcttaaacaccagcaaacagaagggttatcgctgaaccaacgtcgttatctgatttatgggaacggcaggccacaggcatccctggagagcatggaaatcgaagggggtaatctgtgccaatatttctgccgtatcaatgcctcccgcaatgatgcaattgcaacaaggggaaatttgcgcctggatcgcacgaataaacggttcgaaggagcggtgcgtgatttgttgctgaataaaacttttatccagcatgacgcgggtgaaaagaccatcaaaaaccgctttcattgtgctattgcctgctcccaaattacctaacacaaggggatacacttggcttaaggataaaagaccgcgattatcttttccttcattgagatgcgggtaattctcattaatcaacagttcaataaacggatattttaatagttcgcctgcgtaattatccctctctaataataatgtagccacttgtggcgttaaattaagccaggcaaagagtttatgttgaataaaaaaatgttggcaactttttagtaattccaactgctcactaaataattgccaatgttgctcctcggtaagttgcgctataacccgactcgtcgggatacgaaccgtaccatcttcactggagaaatgggtaattaactcaacgccgacaaggacttgctggttgtctcttatcggcaggaaatagcaatcagaatgataaagattctccaaaaaaatcttcatggtaaccgtccctctcgaaggatgtttttcagtatccggctaaaagggatgaggccataagacataacaattacagaaggagtaactttcatttgttccatgttaaccactttttcaggggtcctttttttagattatcctgattataaacgaataatccatttacggaatttttgtctgcaaaatactactgtattcaggagtaaatggacggcgatgtatcatcgccgtccatttttcgacatattagattcgtctcgcctgccagaaatttttctgccaatagacattatcaagactggaacgcatcactcccttgctggtagaggcgtggataaattggttgttggtatcgtaaatacctacatgcaaaccattttgtccggaccccgttttgaaaaagaccaggtcacctggcagcaactcgtctttatcaatttgcgtgccaatagaggcttgttgtttggtttcacggggcagctgcaaatcgaaacgatcgcgcatcgtcacaaccacaaatccgctacagtccacaccgcgccgcgtcatgccaccataacgatacggcgtgccatgccagctttgtagctggtcgttcaaaccggcaataacggtaatgctatcagaaagtctggcatttggcggcggtgctttatggtggctacacccggccagaagcagtgctgtgatcaaaataaggcagaaacgcattccgtacggttcctctgttttttattcttgcattaatttagcgtcgtaattacccgattttcaagatactaatgaaatcagatggtgctaatcagcattctgtgaccttcgatatccagacggcgaaaattcatcccataggcctgcgccagatttggcggcgtgagcacctcttccctgcgtccactggccagcatttttccaccttttagcaaccacgcccgatgcgcatgacgcaatgtgtggttgagatcgtgactgctcatcacaatcgccagtccttgctgacacagcgcgctcagaattttgtctaacgcactttgttgcgcaacatcaagactgttcatcggctcatcaagaagcagcaattggcctgcgggattggcttgtggtgtgatttgcaacaccaccgcagcaagacgtacgcgttgccattcaccgccggaaagttgattggtgctacgtccgagtttgtcatcaagagccagcgcccctgcgacatcattcagtagttcggtacgcgttttatcgtgctgatgcagtgtcaggtagtgccagaccggcgttgcaaacggcggcgtctgctgttgactaagataggcgcgatgcagcgcgagttttgttgcggaccatgcttccagtggttgccccgcgaactgaatgcttcccttaccgctggtcattccggccattcgcgccagtaaggtactcttacccgcgccattcggccccaccaggtgcaggatctccccagcccgaacctcgccagaaagcggccccaggcgggtagattccgcaacatcttgtaactgcatcacaatagacattattttgccaacgccagtttaatgctttccatcacaatgggatcttccggcgtcatatccggggaaaaacgctggatgacttttccgtccctgccaaccaggaatttttcaaaattccataaaatatcatccgggtacagcggtgcacggcctttgctgaccatacgggcatagaatccgctctcttccggcgcgactgcggtcggcgctgcggcaatcaatttttgatacagcggatggcgtccttcgccattaacttcaatcttactgaacatcgggaacgtcaccccccatgtggtggtacagtaagttttaatctcttcatcgctgcccggttcttgttccagaaactggttgcacgggaatcccagcaccataaaacctcgatcgacccaggctttctgaatattctccaactgctcatattgcggcgttaagccacacttactggcgacattgacaatcaacagcacattaccggcgaacttctccagcgtggtcacttcaccgtcgatatctttcactacggtcgtcagaatggaatcttgcatcgtttctcctgggtgtggtcagtaaaaatcttagcttttaatcatagaccgtctttttgcggttaacgtcctgcttttaacaataaccagataaacaccggcgcacctaacgttgcggtgaccacgccaataggcagctctgcggcagctaatgccaggcgcgctacaatatcggccagcagcaatgcgctcgcccctgccagcgcgcagccgggaagtaatacgcgatgatcggttaaaccacacaaccggagaatatgggggatcaccagaccaataaagccgatagcacccgccagcgccacactgacgccaaccatccagccggtcgctgccaccagcacattgcgccagaaccacaggggtaaacccagttgccgcgcgctgatctcgccaagtgctaacatattcatcggcctggactgacaacagatccacaacaacacggggatcaatgccagcatcagccagctttgccgccagtctacgccgccaaaaccgcccatcatccagtacatcagctgacgcaaatcaacactggtggaaaagtagatagcccacgtcattagtgcgctacagataatccctaatgcaacgccagccagcaataaccgactggtgctaagatgacgacgggcgaaacgtaagagtattaaagtgatgataagcgcgccagcaatcgcacacagccctagcgcccagttggggagttgcccttgcccaagcaataccgcggcgataagccccacgcctgcgccgttagagacgccaagtagtccaggttctgccagaggattttcaaacaacgcctgcattacagcgccggatatagccagcgccgcaccaaccagcaatacagccagcgtacgtggcaggcgaatttgccagacgaacagttcgccacgaggagtaaaccagtcacctgggctgatccattgttcaccggcgcaaaggcttaagagaagcgccagcagcatcaaaacactcaggcataataaccagcgaatattttgtcgctgttgttggcgggcaagtgtcagcatggtatccgttctgctgaagtgtcatggcgttgattttacggtgactcttcgacagtgaaaagaaaaaaggccgcagagcggcctttttagttagatcagattactcgtctttggggctagcgttttcgacccggctttttaacttctgcccgggtctgaaggtcaccacgcgccgtgctgtaatgggaatatcctcgcccgttttcgggttacgtcccgggcgttgattcttatcacgcagatcgaagttaccaaaaccagagagtttcacctgttcgccgttttccagagcgcgacggatctcttcgaaaaacagttcaaccagttctttggcatcccgcttgctaagcccaagcttatcaaacagatattcactcatttcagcttttgtaagcgccataggttcaatccctcaaacttgcctggaatcgctcttttaatgcctctacacatttggcgacggtagcggcaatctcctcttcttcgagtgtacggctggtatcttgcaggatcaggcttatggcgaggctcttatacccctccgcaacacccttaccgcggtacacgtcaaataagtttacgccaactacctgatttacgccaactttcttacattcggataaaatatccgctgcgggaacgttttctgcgaccaccaccgcgatgtcacgacggttcgccgggaagcgagaaatctcgcgcgcctgaggcaccacgcggtctgcgagcttgttccactccagttcgaacaccagagtgcgaccgttaagatccagtttacgttccagttcaggatgaacaaccccaacaaaaccaatacgttcacctttcagataaatcgctgcggattgccccggatgcagtgccggattcgcttctgcacggaactcaacctcattcagtttaccggtcaggtcgagaacggattcaagatcgcctttcaaatcatagaaatcaacggtctcttttgccaggttccagtgctcttcgtaacggttaccgcaaatcacaccggctaacatcagatcctgacgaatgcccaacggtgcctgagtatctggtacgaaacgcagaccgctttcgaaaatgcgcacacggttctgctgacggttctggttgtacaccacggttgccagcaggccagtccacagagaaagacgcattgcactcatttcaacagagatcgggcttggcagcagtaaggcttcaacgcctggatggatcatctgctgcactttcggatcaacgaagctgtaggtgatcacttcctgatagcctttgtcgttgagcagcgttttcacgcgcttgaggctcaggtcagcttcacggtgagtacccataatcaggcttgcctgtaccggctcatccgggatgttgttgtagccgtaaacacgcgcgacttcttcaaccagatcttcttcaatctccatatcgaaacgccagctcggcgcaactgcctgccattcgtctttgccttcggtcacttcgcagccgagacgacgcagaatgtcagttacctgctcatccgcaatatgatggccgatcaggcgatccagtttgctacgacgtagagtgatggttgcacgcttcggcagcgttgcttcgttggtgatatcaattaccgggccagcctcaccaccgcagatgtcgatcagcagacgggtcgcacgttccatcgctttgtgctgcagtgccggatcaacgccacgctcataacggtgagacgcatcggtatgcaggccatgacgacgagcacgaccggtgatagacagcgggctaaagaacgcgcattccagcagcacgttttgtgtttcgtcattcacgccagagtgttcgccaccgaagatgccgcccatcgccagcgccttgttgtggtcggcgatgaccagagtgtcagcattcagcttcgcttcagtaccgtcgagcagcaccagcgtttcgccctctttcgccatccgcaccacaatgccgccttcaatgcgatctttatcgaaagcgtgcatcggctggcccagttcgagcagcacatagttggtgacgtcaacaactgcatcgatagaacggatcccgcaacgacgcagtttttctttcatccacagcggagttggcgctttaacgttaatgccttttaccacacggccaagataacgcgggcaggcttccggcgcttcgactgtaatcggcagcgtgtcgtcgatggtcgcaccaaccggaacgatttccggttgaaccagcggcagctggttcagcacggcaacgtcacgcgcaacaccaatgatgcctaagcagtcggcacggtttggcgtcacgctgatttcgatggtgttgtcatcaagtttcaggtattcacggatatcggtgccaatcggcgcatccgcaggcagttcgataatgccgctgtgatcgtcagaaatgcccagttcagagaaggagcacagcatcccttcagacggttcgccacgcagtttcgccgctttaattttgaaatcacccggcagaacagcaccaatggtcgctaccgctacacgcaggccctgacggcagtttggcgcaccgcagacgatgtccagcaggcgatcgccgccgacattcacttttgtcacacgcagtttgtcagcgttcggatgctgcgcacactcaaccacttcaccaacgaccacgccgtggaagctgccggcaaccggttctacaccgtcaacttccaggcccgccatagtgatttgatttgccagcgcatcgctatcaatcgccgggttcacccattcgcgtaaccacagttcactgaatttcataatctattcctgccttatttaaactgtttgaggaaacgcagatcgttttcgaagaaactacgcaggtcggtgacgccgtaacgcaacatagtcagacgctccatccccatcccgaaggcgaaaccagagtaaacttccgggtcgatgccaacgttacgcaacacgttcggatgcaccatcccgcagcccagcacttccagccatttaccgtttttacccatgacgtccacttctgcagaaggttcggtaaacgggaagtaggaaggacggaagcgaatctgcaaatcttcctcaaagaagttacgcaggaagtcgtgcagcgtgcctttcaggttggtaaagctgatgttggtatcaacaatcagaccttccatctgatggaacatcggcgtgtgagtctggtcgtagtcgttacgataaacacggccaggcgcgatgatacgaatcggtggctgctgggctttcatggtgcggatctgtacgccagaggtctgggtacgcagcaggcgggtagtgtcaaaccagaaagtgtcgtggtcagcgcgcgccgggtggtgaccaggaatgttcagagcatcgaagttatgataatcgtcttcgatttccggcccggttgccacggtaaagccaagctcaccgaagaaactttcgatacggtcgatggtacgggtaaccggatgcagaccgccgttttcaatgcgacgacctggcagagagacatcaatcgtttccgccgccagacgcgcattcagtgcagcgctttccagttccgctttacgcgcattcagcgcctgctgaacctgctctttcgcttcgttgataaccgcaccagctgccggacgctcttctggcggcagctcacgcagggtcgtcatctgaagggttaagtgcccttttttacccaaatattcgacgcgcacattatctaacgcggcaacatcactcgcctggctaatggccgccttcgcactggcaaccagttctgcgagatgactcatggttttcctcattgtgtcagtggtgacactggttcgttggacttagagcctatcccatcaggctattttacttgccattttggtcccgggctgtgctcgaaattctcacgtacttaaatacgctccggtttctccgcgctggccgtgtccagtctggctgcgacaattacacctgatgagacaggctttttatttttcaaaacgcgcatacaaaaaaagcctccactgggaggctttcaggcgctgttttccgtttctcttctcacgcgctagcctcctggattcaggtgctaaagtaaaaaaagaagcggaaaatagcagcattcattgcttgcgttaccttttggtactcttcaaaagacctttattgaaaaggctacggcgataaaagtcaatgttttgatggcgttgaaacgaaaagagggagactagctccctctttcaactggcttatgccagagctgctttcgctttttcaaccagagcggtgaacgctactttgtcgaatactgcgatatcagccaggatcttacggtcgatttcaacagaggcttttttcaggccattgatgaatttgctgtaagaaataccgttctgacgtgctgctgcgttgatacgcgcaatccacagttgacggaactgacgcttacgttgacgacggtcacggtaagcatactgaccagctttgataacagcctggaaggcaacgcggtatacgcgagaacgcgcaccgtagtagcctttagcttgtttcaaaattttcttgtgacgtgcacgtgcaataacaccacgttttacgcgagccatatgtgctctcctgtatctatattctaattaaaaagttaaaaacgttaacggcttatgcgtacggcaggcacgcgattaccaggcccagatcgcctttggaaaccatggctttcggacgcaggtgacgtttacgtttggtcgcttttttggtcagaatgtgacgcaggttagcgtgcttgtgcttaaaaccacctttaccggtttttttgaagcgcttagcagcaccgcgtacggtcttaatttttggcattttaataacttccacttcgcattgttaataaacgaaacaaaggcgaacaaagcctgtgaagcccgaaggctccacagacagtgctacttgaaggccttactgtttcttcttaggagcgagcaccatgatcatctggcggccttcgatcttcgttgggaaggattcgaccactgccagttcttgcaaatcgtctttcacgcgattaagcacttccataccgatttgctggtgcgccatctcacgaccgcggaaacgcagcgtgattttggctttatcaccctcttcgagaaagcgaatcaggctgcggagttttacctgatagtcgccttcatctgtaccaggacggaatttaatttccttaacctggataactttttgctttttcttctgttccttagaagacttgctcttttcatagaggaatttgccgtaatccattatacgacaaaccggcggctcggcgttagggctgatctcgactaagtctactccggcttcttctgctttctccagagcttctctcagactcacaataccaagctgctcgccttccagacctgttaagcgaacttcctgggcgcgaatttcgccattgatacggttagggcgcgccgtttgaactcgttttccgcctttaataccttattcctccaattgtttaagactgcggctgcgaatctcttgttgcagcttctcgatcacttcatttacgtccatgcttcccaggtctttaccacggcgggtgcgaacggtaactttgccactttccacctctttatcaccacagaccagcatatatgggacgcgacgcaaagtgtgctcgcggattttaaagccaatcttctcatttctcaagtctgctttaacacgaatgcccgcattacttagtttttgcgtcaattcgttaacgtattcagactgactatcggtaatattcatgataacaacctgaaccggcgcaagccaggtcgggaagaaaccagcgaactcttcggtcaggataccgatgaaacgttccatgctccccagaattgcgcggtgaatcattaccggtactttacgttcattgtcttcgcctacataagaagcgctcagacgagacggcaaagagaagtccagctgtactgtaccgcactgccatgcacgatcgaggcagtcatacagggtaaattcaattttcggaccgtagaaagcgccttcacccagttgatattcaaacgggatgttgttttcttccagcgcaaccgccaggtccgcctcagcacgatcccacatttcgtcgctgccaatacgtttttcaggacgagtggagagtttgacgacgatcttctcgaagccaaaagtgctgtacatatcatagactaaacggatacatccgttaacttcatcgcgaatttgttcttcagtacagaagatatgcgcgtcatcctgggtaaatccacgcacgcgcatcaggccatgcaggctaccactcggctcgttacggtggcagctaccaaactcggccatacgcagcggcagatcgcgataagacttcagcccctggttgaaaatttgtacgtgacccgggcagttcatcggcttaatgcagtattcacggttctcagaagatgtggtgaacattgcatctttgtagttgtcccagtgaccggttttttcccacaggacacggtccatcatgaacggacctttaacttcctgatactggtactctttcagtttagaacgaacaaacacttccagttcacggaagatggtccagccgtcgttgtgccagaataccatacccggcgcttcttcctgcatatggtacaggtcgagctgtttaccgattttacggtggtcgcgtttcgcggcttcttccaggcgctgcaggtaagcgttaagtgcttttttgtctgcccacgccgtaccgtaaatacgttgcaacattttgttgttgctgtcgccacgccagtaagcccctgccgttttcattagtttgaaatgatggcagaaacgcatgttcggtacgtgcggaccgcggcacatatcgacatattcttcatggaagtacagacctggcttgtcatcatgggcgatgttttcgtcaagaatggagactttgtagctctccccacggttggcgaaagtttcacgcgcttcgtgccagctgactttcttcttaatgacgtcgtagtttttctcagcaagctcatgcatccgcttctcgagtgcttcgacatcttcctgggttaacgtgcggtcaagatcaacgtcgtaataaaaaccgttgtcaataaccgggccgattgccattttggtatgcggccaaagttgtttaatcgcgtgccctaacaggtgcgcacaggagtgacgaatgatctccagaccttcttcgtctttggcggtaatgatgctcagttgtgcgtcgttttcaatcagatcgcaagcatcaaccagttcgccattaacgcgccctgcgatacaggctttcgccagacctggaccaatgtccagcgcaacatccatggggcttacagcgtgatcgtaatggcgttggctgccatcaggaagagttataacaggcattttatatccttatttgcagtggtgacccacacgaaagatcacatacaaagaaaaatttgtttattaacagttcattgcgaaaccatctagccaacaaatgctaaattggttcgcaatcaggtacacaaatgaaagacattaacctctcaccttccacccggttgagcgatgttaacactaaaaaaagggagattgtacctttccgtttcacattgattcgattcgcaattcgtttgtagtgagtacaccagcaaaacgcttaaagaacaactgataacatcacggtgcgtctgaaaggtttactgcgagcggatttacagcagcataaactgaatccagcaaagttcgttgcgtgatttggcggtagtattttaaacgctcatgagattaatgacgaagtggtcatatcacaatgataaaagtgacacaattcttataacaatttttcgtgcacatttcgttctggcgataataattaatcatcatcctcaaaacctccagatatatataaggcgaacagattatgagtcaaaacgatatcattatcagaactcattataagtctcctcatagattgcacatcgatagcgacataccaacaccttcatcagagcctattaatcaatttgcgcgccagctcatcaccctacttgatacctctgacttaagttcgatgctgtcatactgtgttactcaggaatttaccgcaaactgtcgaaaaatatcacaaaattgttattccactgccctttttaccattaactttgccacttcacccatccatacagaaaatatactcattacattacactataaaaaagaaatcatttccttattactggaaaccacgcctattaaagctaaccatttgcgaagcatactggattatattgaacaggaacagttaactgctgaagatcgtaaccattgtatgaaactgtctaaaaaaatccatagagaaaaaaactatacacccaacagtaaatctcaatggtagtgcatgttttttgcaatctccttctgacgctattttttgtcgccatctgtcattgcaatacgcccttgattcattgagaaatggaaaaggcaaagtcaacctgattaaacattactcctccgttgaatccatacagcagcatgtccccttagtccgggacgcggagttcagagcattacttcgccatcctcctgcagggagtcgcgttatcgcgagtaaggattttggcttcgctttagatattttcttttgtcgaatgatggcaaacaatgtcagtcatatgtccgcgattttatatatagacaatcatactttgtcagtaaggctacgaataaagcagtcagtgtatggacaattaaattatgttgtgtccgtttacgacccgaacgataccaacgttgccgtcagagacacccacaggacagcacggggctttctttcgcttgataagttcatcagttcaggtcccgatgctcagacctgggctgatagatatgttcgcaactgtgcaattgctattctgcccctattacctgtgggagttccaggggctattttcgcgggtattgcatcacgaatgccatttgcccctatacatccatcggcaatgttgttaataatggctacaggccagtctcaacagcttattacattattcaaacagttgcccatactccctgaaaaagaaatcattgaaataataactgcgcagaatagcgttggtacacctgctttatttttggctatgatgaacggacatactgacaacgtgaaaatatttatgcaagaaattcagtcactggtagataatcacatcattcatgaagataatctggttaaattactgcaaactaaaagtgctaacgaaacacctggactttatatctccatgttgtatggattcgatgaaataatcgatatctttctgaatgcattaaccactccaatagcacaagagcttttaaacaaaaaactggtgatgagtattttagccatgaaaatacatgatggtgagccaggattatacgccgcaatggaaaataatcaccctttgtgtgtcacacggttcctctctaaaattaatggcatcgcctttaaatacaagttgagcaaagctaacatcatggatttattaaaaggagctacagcacagggaacccctgcattatacatcgccatgagcaagggtaatgaagacgtcgtgttatcttatatatcgacgctgggtgcttttgcaaaaaaacattcttttagtcaacatcagttatttacactattggccgctaaaaatcatgacaacatgtcagctgttcatatagccattcatcataagcattataaaactgtagaaacatattatgctgctattaatgcaatcagccaaagcctgagttttagtgctgatgaaataaagacgtatttataaccagctatttacgatatatatcgatacataattttatttttttcataaaacgcagaaacagtgaccatgtgcacaacgccacccgacggctgtaataacaaaaaatcccttgatgcctgtcccttttgttacactccgttatcacgcacaagagatatgcaggacactggtatgccgactaaacgctttgataaaaaacactggaagatggtggtggtgctactggcaatctgtggcgctatgttgttgctacgttgggcagcaatgatttggggctgagcagtgacaaacgaagacagccagaccgcataacacggtccggcagataattttacatgctgtagcccaggcttaaggttgtccgacggtcggtatgttccggtgcagactctggaggttcagagttccatgtgacgttgtaagccaccttcagtccaaaatgttcattaatagcaacatttaatgcgctttcggagttcagcgttgtgtcttccgcgccaaagacgctaacaccctgcgtaaatttagcgttgtcagtcaactgccatgcataagccccggaggcatagcccagcggctgggtttcactggcattgtcggtatatttgtcgtaacgcacacctggaccgaattcaaagcggaaactgtgtaccgggccattcaaaaactgacgaccataacccgcggtcaacacatcgcgctctcgatagccgttataacggtctgtcagccagcttgcctgaccaaataaatagtcataatcagttaaattaaaacggctacgcccgcccgccgcatatttttcactagaacgctcatcattagaagaagtattactggcgttcccccacaggctccaggcagtggtgtgtccataccaggtcatggtggtgtcagccgtaagactggagcttttcgtattgccactttgtgcaagatatcctgcgttcagattaccttcgaaaggttttttagcgctggcaggatcatccatgacagtaaaaacggaatcatcggcagctgcattcagactcgcaaacatgccccccgccaacataacgatggcaggaactgtcttcaaaagcttcatttatcaagagtccgtacaacaaaaaaagagaccatcgcggtcccggaaactttcttaaggatcaaagattagcgtccctggaaaggtaacgaattataaaaaggcgcgaataacttagcaatgtattcttatttcattttttgaataagcatgtggcgaaaacagatttttatttatatatatttatctgcaaaattttaaataaagctccaataaatcatattgttaatttcttcactttccgctgattcggtgccagactgaaatcagcctataggaggaaatgatggtacgtatctatacgttgacacttgcgccctctctcgatagcgcaacaattaccccgcaaatttatcccgaaggaaaactgcgctgtaccgcaccggtgttcgaacccgggggcggcggcatcaacgtcgcccgcgccattgcccatcttggaggcagtgccacagcgatcttcccggcgggtggcgcgaccggcgaacacctggttagtctgttggcggatgaaaatgtccccgtcgctactgtagaagccaaagactggacccggcagaatttacacgtacatgtggaagcaagcggtgagcagtatcgttttgttatgccaggcgcggcattaaatgaagatgagtttcgccagcttgaagagcaagttctggaaattgaatccggggccatcctggtcataagcggaagcctgccgccaggtgtgaagctggaaaaattaacccaactgatttccgctgcgcaaaaacaagggatccgctgcatcgtcgacagttctggcgaagcgttaagtgcagcactggcaattggtaacatcgagttggttaagcctaaccaaaaagaactcagtgcgctggtgaatcgcgaactcacccagccggacgatgtccgcaaagccgcgcaggaaatcgttaatagcggcaaggccaaacgggttgtcgtttccctgggtccacaaggagcgctgggtgttgatagtgaaaactgtattcaggtggtgccaccaccggtgaaaagccagagtaccgttggcgctggtgacagcatggtcggcgcgatgacactgaaactggcagaaaatgcctctcttgaagagatggttcgttttggcgtagctgcggggagtgcagccacactcaatcagggaacacgtctgtgctcccatgacgatacgcaaaaaatttacgcttacctttcccgctaacaaaaacattcccccagcattgggggaatcatcaccaacctgtcggcaacgcgtttctccgactatgctcaaaagtcatgtgataacaaaggggtgaactatggccagtggcgatcttgtccgttatgtcataaccgtcatgttgcatgaggatacattgactgaaattaacgagttgaataattacctgactcgcgacggttttttgctcactatgacggatgatgagggaaatatccatgagctgggaactaacacttttggacttatcagtacccaaagtgaagaagaaattagagaactggttagcgggcttacccaaagtgcaaccggcaaagatcctgaaatcaccatcacgacctgggaggaatggaatagcaacagaaaataaatggtttttgggcaataatcagtctgtggtgtgcgttagctcgtgtttttacaccgcattcttgcgctaaccttatgatctggcagacaacatgggagagacatcatgtggcaggcaatcagtcgtcttttgagcgagcagttaggtgaaggcgaaatcgaactgcgtaatgaactgcctggcggagaagtccatgccgcatggcatttgcgctatgcaggacatgattttttcgtcaaatgtgatgaaagggaactgcttcccggttttaccgccgaagccgaccaactggagttactgagccgtagtaaaaccgtcaccgtgcctaaggtttgggcagttggcgctgaccgtgactacagttttctggtgatggattatctcccacctcgtccgctggatgcgcatagcgcatttattcttggtcagcaaattgcgcgtttacatcaatggagcgaccaaccacaatttggccttgatttcgataacgcgctctccacaactccacagcccaacacctggcaacgtcgctggagtacgttttttgctgaacaacggattggctggcagttggaactggctgcagaaaaagggatcgctttcggcaatatcgacgccatcgtcgagcatattcagcagcgtctggccagtcatcaaccgcagccttctctgttgcacggcgatttatggtccggcaactgtgcactgggtccggatggcccgtacattttcgacccggcctgctactggggtgaccgagagtgcgacctggcgatgttaccgctgcatactgaacagccgccacaaatctatgacggctatcagagtgtatccccgctacctgccgatttccttgaacgtcaaccggtttaccaactctacacgctgttaaatcgtgcaaggttatttggcggtcagcatttggttattgctcagcagagtttggatagattattagcagcatgatatgggttgaggataatggccgctccgtgcggccttttgattaaataaacccaagcagagaaaagaacacataacctgcagcaatacaaataaccggcaggatatacagactgaaaaactgcaggaaaatagtatggtgcggaacaacaatacgggactcaatttgttcacgcgttagcccctcttcccctttggctttttccagaatgagttgatcttcaacaccttcccgcaagaagcgcgcctggcgactcatccgggcaccggaatcctgcaacgccagtccgacaaaaatcaggatgaaaatcacccagaacataacgttcacgccaccattaaaattgggcgtcggggagttataccagaatagattcaaaaaaggcgtattcgcctgcatcatatcgatcatgacatgagtaaagtcgagcatgaccgcattaatgccttccttgttttcctgccgggtattcataaatttcagcaaagaaatcaatgtagagatcaatgcaggtataaaaatcacccaacccaaaatccttttcaaaacagcaatgcgtccagcttgttgatacgtcatgagttctccttgattaagacgcgtcgtttcacttagtttacctgtagatatctgttttcgcccattctttaaaggcgatatgataggcgcttaatcataagcacggcttaataccttacacataatgctctaaaggagaggttgtaatgagtaccccgcgtcagattcttgctgcaatttttgatatggatggattacttatcgacagtgaacctttatgggatcgagccgaactggatgtgatggcaagcctgggggtggatatctcccgtcgtaacgagctgccggacaccttaggtttacgcatcgatatggtggtcgatctttggtacgcccggcaaccgtggaatgggccaagccgtcaggaagtagtagaacgggttattgcccgtgccattagtctggttgaagagacacgtccattattaccaggcgtgcgcgaagccgttgcgttatgcaaagaacaaggtttattggtgggactggcctccgcgagtccactacatatgctggaaaaagtgttgaccatgtttgacttacgcgacagtttcgatgccctcgccagcgccgaaaaactgccttacagcaagccgcatccgcaagtatatctcgactgcgcagcaaaactgggcgttgaccctctgacctgcgtagcgctggaagatagcgtaaatggcatgatcgcctctaaagcagcccgcatgcgttccatcgtcgttcctgcgccagaagcgcaaaatgatccacgttttgtattagcagacgtcaaacttagtagcctgacagaactcaccgcaaaagaccttctcggttaatgaccaggggcagtgatctcgctgcccctggttctttatctgaaattgcattcaactgacggattaatcgtcaatttaagagaaagagttacaccgtcaccacttccgtgcactgtataaaaatcctatactgtacgtatcgacagtttagtgagttttatcatgacggcggaaggtcaccttctcttttctattgcttgtgcggtatttgccaaaaatgccgagctgacgcccgtgctggcacagggtgactggtggcatattgtcccttccgcaatcctgacgtgtttgttaccggacatcgatcacccaaagagctttcttgggcagcgattaaaatggataagtaaaccgatcgcccgcgcttttgggcatcgtggttttacccacagtctgctggcggtatttgcgctgctggcaaccttttaccttaaggttccggaaggctggttcattccggctgatgcgctacaaggaatggtgctgggttatttgagccacatacttgccgatatgctgacacccgccggtgttcccctgctctggccatgccgctggcgtttccgcttgcctatcctggttccccaaaagggcaaccaactggaacgttttatctgcatggcattatttgtctggagcgtatggatgccccatagtttacccgagaacagcgctgttcgttggagtagccaaatgatcaataccttgcagatccagtttcatcggcttattaagcatcaggttgaatactaaaaaggcaaaaatcacctttctggaataagcaattccatttgaatataagagccagctcacagttctgttaatcttgcgccaacactatgactgctacgcagtgatagaaataataagatcaggagaacggggatgaactttccattaattgcgaacatcgtggtgttcgttgtactgctgtttgcgctggctcagacccgccataaacagtggagtctggcgaaaaaagtgctggtgggtctggtgatgggtgtggtttttggccttgccctgcataccatttatggttctgacagccaggtacttaaagattctgtacagtggtttaacatcgttggtaacggctatgttcaactgctgcaaatgatcgttatgccgttagtcttcgcctctattctgagcgcggttgcccgtctgcataacgcatctcagttaggcaaaatcagttttctgaccatcggtacgcttttgtttaccacgctgattgcggcgctggtcggtgtgctggtcaccaacctgtttggtttgacggctgaaggtctggttcagggtggtgcagaaactgcacgtctgaacgccattgaaagtaactatgttggtaaagtctctgatctgagcgttccgcagctggtcttgtcctttatcccgaaaaacccgtttgccgatcttaccggagccaatccgacgagtattatcagcgtggtaatttttgccgcattcctcggcgtagctgcattgaaactgctgaaggatgatgcgccgaaaggtgaacgcgtcttagccgctatcgataccctacaaagctgggtgatgaaactggttcgcctggtcatgcagttgaccccttacggcgttctggctctaatgaccaaagtggttgcaggttctaacttgcaagacatcatcaaactgggaagtttcgttgtcgcgtcctacctcggtctgctgattatgtttgcagtgcatggcattctgctgggcattaatggcgtgagtccgctgaagtacttccgtaaggtatggcctgtgctgacgtttgcctttaccagccgttccagtgctgcgtctatcccactgaatgtggaagcacaaacgcgtcgtctgggcgttcctgaatccatcgccagtttcgccgcctctttcggtgcaaccattggtcagaacggctgcgccggtttgtatccggcaatgctggcggtgatggttgcgcctacggttggcattaacccgctggacccgatgtggattgcgacgctggtcggtattgttaccgttagttccgcaggcgttgccggtgtcggtggtggtgcaactttcgccgcactgattgtactgcctgcgatgggcctgccagtaaccctggtggcgctgttaatctccgttgaaccgcttatcgacatgggccgtacggcgttaaacgttagtggcagcatgacagctggcacgctgaccagccagtggctgaagcaaaccgataaagccattctggatagcgaagacgacgccgaactggcacaccattaattcttatgctggcaacggtccgttttgtataggggccgttgccttactttttaaatgttccatcgcggcgatgcatacactctcatatttaaacagatcgtcagcgaaaaaaatgtccaacttatcaatacattcctggctcaaactatgtgcctgtaggctgaagcttaaaacctcatacccgagacgttttctaagactactatctggaatactcataatatcttcaagcacaccacttcccattcccggaagatttagtggattaaaaagaagattgatattaagcatacttattatgctaggaaactttaggagactctcatttttttgaatcgcagcaaaaatgctcccgacaggatgtatataattttgttcatagtatatagtccttaaatagtgaataaccaacctgttttttatactgatcaaattggtcattttttctgggcgaaatacagaagtgacatccattccaataaaatctttatttatacctcttatccgaatttcactaccataaagattattaattattactctatatttaacattgtcctgcagatatgtatcaaaactaagtgctggcgctcctggcttactggcatcatagttaatgttagacatataggcaatcatataattaaagttactttctgctatttcatcgcagtcacattgacccgtacttataaagaaagtgagtgctgtcatagtagactgcagcctttctttaaaagagtcgaaagccaggcttttaatatttaaatcaccataattactctgtattaagtttgtagaaaacatctcccgcctcatattgttaacaaaattattatctcatttaaatctaagtcatttacaatataagtttaagagcgacgccacaggatgaactatcaaaaatagctcatcatgattagcaaaacttaaccattttaaaataaataaacaattaaagaaaaaagatcacttatttatagcaatagatcgtcaaaggcagctttttgttacaggtggtttgaatgaatgtagcaacgaaatacagaatttcaggtcatgtaactcccggcaaaaccgggaggtatgtaatccttactcagtcacttccccttcctggcggatctgatttgcccaacgttgggcagattcaggcacagtaaacgccggactgcgcagaaaactctctcccatcagtacaaacgcaacatatttgccacgcagcatccagacatcacgaaagctatccatctttatcgcatgttctggcggcgcgggttccgtgcgtgggacatagctaataatctggcggttttgctggcggagcggtttcttcattactggcttcactaaacgcatattaaaaatcagaaaaactgtagtttagccgatttagcccctgtacgtcccgctttgcgtgtatttcataacaccgtttccagaatagtctccgaagcgggatctggctggtggtctatagttagagagttttttgaccaaaacagcggccctttcagtaataaattaaggagacgagttcaatgagccaacataacgaaaagaacccacatcagcaccagagtccactacacgattccagcgaagcgaaaccggggatggacagtctggcacctgaggacggctctcatcgtccagcggctgaaccaacaccgccaggtgcacaacctaccgccccagggagcctgaaagcccctgatacgcgtaacgaaaaacttaattctctggaagacgtacgcaaaggcagtgaaaattatgcgctgaccactaatcagggcgtgcgcatcgccgacgatcaaaacagtctgcgtgccggtagccgtggtccaacgctgctggaagattttattctgcgcgagaaaatcacccactttgaccatgagcgcattccggaacgtattgttcatgcacgcggaagtgccgctcacggttatttccagccatataaaagcttaagcgatattaccaaagcggatttcctcagtgatccgaacaaaatcaccccagtatttgtacgtttctctaccgttcagggtggtgctggctctgctgataccgtgcgtgatatccgtggctttgccaccaagttctataccgaagagggtatttttgacctcgttggcaataacacgccaatcttctttatccaggatgcgcataaattccccgattttgttcatgcggtaaaaccagaaccgcactgggcaattccacaagggcaaagtgcccacgatactttctgggattatgtttctctgcaacctgaaactctgcacaacgtgatgtgggcgatgagcgatcgcggcatcccccgcagttaccgcaccatggaaggcttcggtattcacaccttccgcctgattaatgccgaagggaaggcaacgtttgtacgtttccactggaaaccactggcaggtaaagccagtctcgtttgggatgaagcacaaaaactcaccggacgtgacccggacttccaccgccgcgagttgtgggaagccattgaagcaggcgattttccggaatacgaactgggcttccagttgattcctgaagaagatgaattcaagttcgacttcgatcttctcgatccaaccaaacttatcccggaagaactggtgcccgttcagcgtgtcggcaaaatggtgctcaatcgcaacccggataacttctttgctgaaaacgaacaggcggctttccatcctgggcatatcgtgccgggactggacttcaccaacgatccgctgttgcagggacgtttgttctcctataccgatacacaaatcagtcgtcttggtgggccgaatttccatgagattccgattaaccgtccgacctgcccttaccataatttccagcgtgacggcatgcatcgcatggggatcgacactaacccggcgaattacgaaccgaacagcattaacgataactggccgcgcgaaacaccgccggggccgaaacgcggcggttttgaaagttaccaggagcgcgtggaaggcaataaagttcgcgagcgcagcccaagctttggcgaatattattcccatccgcgtctgttctggctaagtcagacgccatttgagcagcgccatattgtcgatggtttcagttttgagttaagcaaagtcgttcgtccgtatattcgtgagcgcgttgttgaccagctggcgcatattgatctcactctggcccaggcggtggcgaaaaatctcggtatcgaactgactgacgaccagctgaatatcaccccacctccggacgtcaacggtctgaaaaaggatccatccttaagtttgtacgccattcctgacggtgatgtgaaaggtcgcgtggtagcgattttacttaatgatgaagtgagaagcgcagaccttctggccattctcaaggcgctgaaggccaaaggcgttcatgccaaactgctctactcccgaatgggtgaagtgactgcggatgacggtacggtgttgcctatagccgctacctttgccggtgcacctagcctgacggtcgatgcggtcattgtcccttgcggcaatatcgcggatatcgctgacaacggcgatgccaactactacctgatggaagcctacaaacaccttaaaccgattgcgctggcgggtgacgcgcgcaagtttaaagcaacaatcaagatcgctgaccagggtgaagaagggattgtggaagctgacagcgctgacggtagttttatggatgaactgctaacgctgatggcagcacaccgcgtgtggagtcgcattcctaagattgacaaaattcctgcctgatgggaggcggcgcaattgcgccgcctcaaatgatttacatagtgcgctttgtttatgccggatgcggcgtgaacgccttatccggcctacaaaactgtgcaaattcaatatattgcaggaaacacgtaggcctgataagcgaagcgcatcaggcagttttgcgtttgtcagcagtctcaagcggcgcagttacgccgcctttgtaggaattaatcgccggatgcaaggttcacgccgcatctggcaaacatcctcacttacacatcccgataactccccaaccgataaccacgctgagcgatagcacctttcaagctcgcacttgtcaacacatccagctccgttaagcgtgggaaacagtaagcactctgacggatagtattatcgataaacgccggatgacacatcacctccaggctacgatcaccccgatggcctgcgtcatccagcacttgcaggaacaggctctcactgatctcttcaccgtagaatgcactgctgaatccctgggtagtgcgcaggttgaccggcaaatcaaacgccatctgacgatccgcccgcaacgcaatgccctgctctgccgcaaacctggcaacaatcgggaaaatctgcgggaacatatgcacatgatgatggctatcaagatgcgtaggtttgcgtccaaatagctcaatgaaacgcaaatactgactgacaagctcctgagtaatttcttccagcggtaaagcatcttcttctgccaactgccagatccattttcccagcacaccatcgcgggttaaccccggcatagctgtcagtggcttacccatagtaaggacaaagtgcatccctatggccagactcggttcatcacgactcaactgcaccgcatggtcaatagcctgcccattcaccagcgccgtcgtgctcgtgacaatcccattgcgacaggcctcgataatgccgtagttctgacctttgcttaagccaaaatcatcggcattaacaatcagtaagcgttccataatcagcctcggttaatgtgcttttttaagctctgcgatgcagtcggcaaagtttggcagccatttctcgtgcgccagaatcatctcgcgtgctagcagctcagcatcgcgatcggaatgcaccaacggactaaggtttagcgccagtaacacatcgttaaattctccgctaagtgcggcgttactggcagcaatctcgaagcctttaatggtgtgaatcagccccattactttatcatcgaaatgcgtaatgcgcggatgtggcgtcgcgccatcgcgccccagcttacaggtcatttctactgcccagtctgccggaatattatcaatctgcccatgatgcgggatattaacgtaatgttctgcttgcttgtcgttgtagatagcgttgatcacttcgcatgctgcatcagagtaataagccccaccgcgctgttccagttctttcggcttaactttcagctcaggatttttatacagctcaaaaagttgtttctcgactttctgtactacctgcgctcgtgcgccgcctttgtagtattcgcccatttcaatagccagcatctctttctgcttgaagtaatacagcagataagaacatggcagcagattcaagctacgaattaagccctcactaaatggcagatcgaaaatattttttacagaggacgcttttaactgcccactcgccacaccatcaagcaattcggcaaagcggctcttgccatttatcagcacatccttaatgaacaccatatggttgaggccgaacaaatcgatagataaatcatcgctgtctttcagcatcagaacatcgcgaataaacatcttcatgccgatcggaatattacacacgccgataaagcgtttaaatccggtatgacgataaacggcttcagtgaccattcccgccgggttagtgaagttaatcacccatgcattcggacaaagttcttcgacatcttttacgatgtcaaaaatcaccggaatggtacgcagacctttaaacaaaccgcccgcgccgttggtttcctgaccaagataaccatgacttaatggaatacgttcatccagttcacgcgccggtaattggccaacgcgcagttgggtagtaacgaaatcagcatctttcaatgcttcgcggcgatccagcgttttataaagcttcatcgggacgccagcgttatcaatcatccgttggcagagatcgaaaataatatccagtttcggtttaccaccttcgacatccaccagccataattcgctgaccggcaattcgtgataacgcttaataaatccttccagtaactccggggtatagctgctcccgccaccaatagtgacgacttttaatttctggctcataatttctcccttcagtacagaatactgatatctggcatatctgccccccggacataaataatccagcaacaggacagatatgtgaattgtcaggtataacgacttgctgattaaattcagtcaatttcttacgatagctcttaggcgtaaaggacgttaatttcttaaacgttttaataaacaaactcgggctactataaccggcctcaaacgcaatatccgtcacactatagttggtcatttccagttgttttttggcaaaattaatacggatttcattaataatctgcattggcgttttgccataatatcgttgagtcgctcgcgtcaaatattcctgacttttggcactcaacgccaccatattctccagcgcgctttcactaaactgctctttatcatgcatcttttctaccgtacttttcagccactgcggtacatcatcaatcacctgttcttcgcggtaatgacgtaaacggttaatgacataaaaagtaaccatctcaacaaactcttccagccctgtttcgcggaaattcaaactagaaatcactgtttccacataggtgagaaaagcgttattggtccggtatacctggctagcgacaaagcaataaggcaacaatggcaggtaatgctgctcaaaaaagcgtttactgatcccaacgttcaatatgcgcgtggcaccaaactcataaaaactttgatggtggctacctaacgaaataaaaacaaaatcgccccgttccagtaacacgcgcttaccgttaatctcctggaaataacgcccggttaataccagagtaaattcataatagtcgtgctgatgcagtccgctgatactctcagttttgttatagataaacacatggaagtttttgccattaaacaactgctgttctcgggcagtggcaatttccggcgcgttaatcactggctgcatcatcgactccttatgccttcagtttttcatgaagctcaattaattcagtaatcagttcacgcgcaagcatggacgtcattaaatgatcctgagcgtggaccagcaccagactcactttcatcttaccttcgcccgcatcgccttcaatcagtttcgtctgtaccagatgcgcttcattcaatgccatccgactctgatccatcatggcttttgctgcggcaaaatcgccctgcttcgcctgtttcagtgccgcatacgccaggctgcgcgcttgtccggagttgatgatcagccccatcaccacttcttccagctcttcagcttccgtttgcgtatcgggaatgttatcgagatccatcatacatcgttcctctcttttcttaccggcacgattacccgtaccggcatcgattaaaatttcagggcgttagcgatatcttcttcgctctcttctttatcaatcgcattttgtgctttgttagccaccacaacaaagggcagataaattaacgttgcgatgccaaggttgaagagtgcgaccagcaatgcggcgacgctaccgttggtgttaaagaaggctcccagaccggttggcatggtccacggtgcaatattggtcaccggaggaataatgcccatgtagtacgctgcgagggtgattgccgccagaatcggttgtaccagtacaaacgggataaacatcaccgggttcatgataattggcagaccaaacagaatcggttcgttaatctggaagatgccggacggcagcgccagttttgccacctgacgataatcagcacggcgagaggcgataaagatagccaggatcaggcctaaagtcgcaccactgcccccaaggaaaataaaggagtccagcatcggcttggcccagatatggaaggtcttaccggctgccagcgccgcttcgacggaaccatattgctgataggtcgcgatattttccagtgcccacggcgtcataatgccgttgtccagtgcggtcagcgccagcgcgccatgaataccgaagaaccagagcagtggaacaaagatcacataggcccagcccaccacgctacccaagcttgccagtggggtactgatggtatccataatgatctgatggaagttggtgccccaggtattcaacgcccaggcaataatccccatcacggaaagaataataaagccgggaattaatgcgctgaaggaacggcttacactagcaggtacgctgtcgggcagtttaatgacccaattgcggcggacaataaaggtaaacatttctgccaccaccaggccaataataatcccggagatgatattcgccccacctaaccagtttgcaccaaccgcataggcctcaccgacactatatggggtgacggtcataaatgctgcaacggataacaacccagccgccagcgcatcgactttacgctcttctgccagcgccatgccaataaagaacggtgccattaaagacattattcctaatgttccgttatatacgttgccgccaatacctttcagaccattaagtgtttcaatggtactggcgtcgaggcgaatacctaaggaataaaaaaagctcccctccccaaagcttagaaaaacgttgttaattaatacaaacatggcccccgcaagggttaacggcattaagcgaataaagccatttttgattgcattaacgtgtggctgctttcctattttaactgcaaaagggaggagtaccttttcaaggcttgcaataacattactcatagaaaaatacccttaaaaaccgcaatttaaatattgcggtattgatttatgaaataactctttgacgggaaaatttaaaataaattaatttgctgcggcttttttaatcgctgcaaccgcagccttaagcacgcctaaaccatcgactttgccataaagcaggctgtcaattacttcaaccggtttgttgggtaacaaacgctggatttcgggcaacatataagcaatctgcggccctaataacacgacatcggcattctgacctttttcaccagccagtgtttccggaaatgcttcaataatgaccggaacttcatatttttctgcctgtgcgcgcattttacttaccagtaaagaggtagacatgcccgcagaacaaaacagataaatgtgtttcttttccataaaactgccctcatcgacgattatctgtcagccagacactccgcaagccttaacctgcttccatgctctgggtaacttgcgaaaccaacatgactttttttgtggctgaaaggagtatacggtatagacctgagcaatagtatttctttgaccttataaattgtttctccttgacctgtggttatgaccctcttcacatttcgggcaaataattcgcgaagataattaagaactcaggccaaaaaaaaccggcgcaatggccggtttccgttgttactcaagctttcagacgaattgattacttcgcagcctgtggatcagtgtcgtattcagcacaggtctgataaccggagttgatgacatatccggtatcatctaacgcgacaaagtaggtttctgctttaccatcacgttgacccaggatgtaggtctggcaagtaccgcgagcatggatcatgctcacttcagagctaggtttacccgcaatttgtgcaacctgcgcccggctcatgccttttttgacgtctttcaccacaggctgtacaaactggtctttggtacgatcataagccgtacaacccgccagcatggttaataccgccgctgcactcagaattcctgccatattcttgttcatattccgtcctcttgtttatcagcgtgttagataagcctggaatacattgggcgctttttcaagcccgtgaacgaaacggctccgctttcagaggattcctgtatgacgttttaaccaccattcagcccgctgtcgcttgtcgtttcagtagcaacgggttagctttaaggaagttttgtcttttctgtctggaggggttcaatgacattgcaacaacaaataataaaggcgctgggcgcaaaaccgcagattaatgctgaagaggaaattcgtcgtagtgtcgattttctgaaaagctacctgcaaacttatccgttcattaaaagtctggtgctcgggatcagcggcggtcaggactccacgcttgccggaaagctgtgccagatggcgattaatgagctgcgcctggaaaccggcaacgaaagtctgcaatttattgccgtacgcctgccctatggtgttcaggccgacgaacaagattgccaggatgccattgcctttattcaaccggatcgcgtattaaccgttaatatcaagggcgcggtattggccagcgaacaggcattgcgggaagcaggcattgaactgagcgattttgtccgtggcaatgaaaaagcgcgtgagcggatgaaagcacaatatagcattgcgggtatgaccagcggtgtcgtggtgggcaccgatcatgcagcagaagccattaccggattcttcactaaatatggtgacggcggtacggacattaatccgctgtatcgtctcaacaaacgtcagggtaaacagttactggcggcattagcttgcccggaacacctttataagaaagcgccaacggccgatctggaagatgatcgcccttctctgccagatgaagtggcactcggcgtgacctatgacaatatcgacgactatctggaagggaaaaacgtacctcaacaggtcgccagaacaatagagaactggtatctgaaaaccgaacataaacgccgtccgccaattaccgttttcgatgatttctggaaaaagtaataatttgcacatattggattgtgcgaaaaagagtaatttgttcacgccggatgcggcgtgaacgccttattcgacctataaaactatgcaaattcaatacattgcaggagtcgaataggcctgacaggcgtagcacgtcagacggtgtaacctttgtcatcgacccgcctcttttttaatcgcttcccgcctgttacactggatagataaccagcattcggagtcaacagtggtacggcgtttaacttctccgcggctcgaatttgaagctgcggcaatttatgaatatcccgaacatttacgtagtttccttaatgacttacccacccgaccaggggtgtatctgtttcatggtgaaagtgacaccatgccgctctatatcggcaaaagcgttaacatccgcagccgcgtcctttctcatttacgtaccccggatgaagccgccatgctacggcaatcccgacggatcagctggatatgtaccgccggtgaaatcggcgctctgctccttgaagcgcgattaatcaaagaacaacagccgctgtttaataaacggttgcgccgcaatcgccagctctgtgccctgcaattaaatgaaaagcgcgtcgatgtggtgtatgccaaagaggtggattttagtcgagcccccaacctgtttggcctgtttgccaataggcgcgcagctttgcaagcattgcagaccatcgctgatgaacaaaaactttgttatggcctgctgggactggaaccgttaagtcgcggtcgtgcatgttttcgtagtgcgctaaaacgttgcgccggagcatgctgcggtaaagagagccatgaggaacatgcgctacgcttgcgccagtctctggagcgtttgcgggtggtgtgttggccttggcaaggggcggtggcgctgaaagaacagcacccggaaatgactcaatatcatattattcaaaactggctgtggctgggggcggttaatagcctggaagaagcgacaacgttaattcggacacccgccgggtttgatcacgacggttataaaattctttgtaagccgctgctttccggtaactatgaaattactgaacttgatccggcgaatgaccagcgagccagttgattactgaacttgatccgggctatgaccagcgagccagttgatttcactgaacaacagtttaccttgcggttgtaaaagccgcagggtgtgcctgccatcgaaccagcacgcgccctggtcggtagtgagcaatttatcgcccagttgccacgccccgttaatcacaaacaccaccccgccgcgactgccaaaggtagtaaacgtacgttcggcaattctgactttcgccttacagacatccaggcgtgtcatgatgttgaaatccatgctcatctgccctgccgtcagtttcgcttttaccacctggtccgctgcaaaggcaaaaggctggaacggttttaaggtatggttaaagcggtctgcgctttcaaggagcatctcgccgccttccagcaacgtcactatcctttccatgccgggaaacaaagaaaactccccattcgccgcgatggatgcaatgctggcacgccagtaaaaatcacgttttgccggtgggaacgtgcaaatttcgcgcgtttcaccggcagcatttcgccacagattcacgctcattttacgcatatcaaagtattccatactcgctcccggcccgttcttttcattgttatcgttcaggtaaccgtggatggttatcggcaactcgggtgatttacgttagtggtgatcaggctttttttacaactgtttgagaagagaaaagaaaaccgccgatcctgtccaccgcattactgcaaggtagtggacaagaccggcggtcttaagttttttggctgaaagattattcagcagttgcaggcattttaccttttgccgctggacgttctgtcagacgcttctcaaaattagcattaaattgctttttctgttccggcgtcaggatgttgtaaattttgttctgggtttccatgtgcgccagcatgttagctttgcgctgttcttccatttttgcgatctgcgcttcagcttttactttatcgaaggtatcgctggcaatgatgtcatgcattgcgcggcgttcttccagcggcggacgtttcatctggtcacgctggcctttcatgatttcgcggatctgctgtttctgcgcgtcggtcaggttcaggtctttgaacatcatgtcctgatgcggaccgaacttgcctttgtggtgcatcatcggcttcgcgtcagccggtgctgcggtagtggtgtctgcggcatgggccaggttagccgcgccaagagccagggtagaggcaacaaacagtgcagttaatttacgcatattctatatccttcctttcagttatttattacggctttcttaagtagcgtgccgtgttgacgagattaactttactgactttagcgtcaattaatcagagcaacggtaaaacaatgaaagtgtaaaaaacacttttgcgccaattatggagaaaaaaagaaaatttgatggagagtgatgagagaatattacaacacgatgattttgcagagattatgaagaactataccggatgactggtgataaataaagcaaataaccaggattaatctgtattaatttataagaaagcaacttaatacccgcagaatgatttctgcgggtaagtattagcttattttttcgagcattaatcccgcgcgtaatcccaacgctaccaacggattagggaataacacatactctacatcatgggttacggtaaaacgttcctctccgtcctgcgccagcaatgttcctttctcaaacggcataaaattcagcgtgtcacttgccatatgcatttcgaaggacgggctgtggcgagtaatttggctaaccacccgataacggagcggcggtgttctcacgataccgacactctcaccagatagcagcgcagcaattgcgctggcagttactgcaaactggcgaagatcgttttgcccaaagggcaacgctttgccaagttccagcgtacaggccagcgcgccaaaatgtctggcgctgaaatgggtaaacgtaccaccaggttcctgatggaacaccagcgcctccagccccgccgcacccagccacgtcagaaatttctcgtcccagggaatgtcgcgttgcggtaatacaccgaactgcggatgcaaggagccacgaattgcggtatgtagatcaaggtgccagcgcacagattctttgccctggtcataaaaatcttccaggcactgttccagttcgcgcgcccgacaggtttctccgctttcagcaaatagctgccaacgaccgccaaacattcgattcatatcgctatggcaataacgtttcccttgcttcagcgcaggaggattcccgaggatcaccagcaaccgccaacgtaacgggatctcgccgtgagatatcgcgccaagcaacgcgtccagcatctccacaggtgccgtctcattaccgtgtattcccgcactaatcaccagtgcgccttgcggtggcgttaatggcgtcagttccagcacaccatcgcccagccagcgccagcgaacgccgttgatttctcgctcggtgataaccggttttttacccgttaaggtcagagcaagaaaattatccattgccccctccctcgcgctggaacggataaacgctaccgagattcagtaattggctcaatacatccagtgcttcccgcccttcgcgcagcaattgcgggtcggccagatcggcagcagtaaggcgatcgcggtagtaacgatccacccagtcattgagcgcattaaacagcgtatcgttcatcatcaccgccggattcaccgcccggcgttcttcttctgtcaataccacccgcaaccgcaggcacgccgggccgccgccattcgccatgctttcacgtaaatcaaagacttttagttcgctaatcgggttgtcagcggcaaggagttcattgagataaccccatactccggcgtgttcccgacactcctgaggcagcaccaacatcatggaaccatcatcgcggctcagcagttggctgttaaacagataggtagacaccgtatcagacacggaaacctgagttgccggaacttctatcgccataaaaccattgacccgcgcacgcaggtttgccagtaactgactctggcgagcgaacgcctgttggtggcaaaacagcacctggcggttactcacggcaatcacgtcattatgaaaaacgccctggtcgataacgtccgggttttgctgggcgaaaatcacctgttggggattcacctgattcagccttgccaccgcctcgctggcttcgcgagtctgtcgcgccggataacgggaaggccgggtatcattgccttcttctcgcccgtagacaaaaagttgcatacccggttcaccgtaatgaccgccgagacgattgtggtttgccgccccctcatcaccgagcaacgctacctgtggcaacgcgctatggacgctaaatttctcttcgtcgttaaaaatcgcttttaacaggctttcagtgacgggcgcttccaggctacggtgaaatttattgttcaggttggcaacggtgagatgcactttgccatccagcgtatcggcagatggcgcgatcgttgccgcattggctacccacattgggctagcggaactgacgctggaaagccagtgcggtgcctggcgtgcaactttttccagtacctgctcatcgctaccactgaatcccaactgacgcagcaccggaataaacggacgctcgtgcggcgggatcacggcctgggggaatcccgcatcggcaagggctttcattttcagtaagccctgcttcgccgccagtcgcgggttagacacctgaaaacggtgacgggtagaggcttcattaccaaagctcaggcccgcgtaatgatgcgtcagccctaccagcccgtcgaaattgacttcccaggcgttcatcgcaccacctcatcggaaaaatccagcccggggttaagcgtggcgggcaatgttaagctgtcgctctccaggctcgccatcggccatgcgcagtaatctgcggcataccaggcgctggggcgatggttaccggaagcaccaatgccgccgaatggcgcggtactggcagcaccggtaagcggtttgttccagttaacaatccccgcccgcgcctccagcaacagttgatcgaacttttcccgctcgggggaaaccagaccgcaagagagtccgaagcgagtgttattcgccattcgaatcgcttcatcgaaagtatcataacgccagacgcgcaataacggtccgaacacctcttcatctggtacgccagcaacgcctgtcatttcaatgatccccggcgtcagcaagcttgtccctgcttgtaataagcgcggcgcaagcaggggtcgtccgcccatcgcttccagttgctgccatgcagtaaccacctgctgtgcggcctgttcagaaatcagcccgccaataaacggctgcggttcgtcatcccagttgcccggcgttaatcgctggctgacggcaaccagacgagcaagaaacgcatcgccctgcgccccgcttttcagcaataaacggcgggcgcaggtgcagcgttgaccggctgtgacaaacgcgctctgaatggtcagatggacagccgcgtcgatatccgccacctcatcgataattagcggattattaccgcccatctcaagggcgagaattttctccggctgaccggagagctggcgatgcaactggtagcctgtattggcgctaccggtaaacagcaaaccgtcgagatcctccagcgcactcagcgcctgacccgtttcacgcccgccctgcaccaggttcagcacgcctggcggcaagccagcctgctgccataaacgcattaccgcttcgccactccacggtgtcagttcgctgggtttaaagataatggtgttacctgccagcaatgccggaacgatatgtccgttcggcaaatgaccagggaaattatacggcccaaacaccgccagcacgccgtgcgggcgatgtcgcaggctcgccgcgccgtccggcatttcactacgctgctcgccggtacgaacgtgatacgccttaatacttatcgcgattttattgatcatcgccgtcacttcggttgccgcttcccagcgcggcttacccgtttctctggcaataatcgcggttaattcggctttattgctttccagcagtgcggcaaagcgttcgacaacggcatgacgttcagcaaaactaagccgcgcccagcgcggaaacgccgcacgggctgcccgacaagcctgctcgacctgagcggcatcggcatcattgccttgccataacacctcgccgcttaccggattacgcttcacacggcttgcgccctggcccgttatccagtcaccgttaatccataaagtcatgctgttttctcctctgcgcacaggcgcaccagacgaacgcgatccccggcgtggcatttgagggcatccagttgtgcggcggttaaaatcaaacgctcggttgccggatcggtacgcaccagcaccacgcggaaatggtgataattttcattggcgaccaggcaggctgggaaatcgccctgcgcaggctgcccttctgccacttccaccagccgacttttacggatggcgcgcacgcggtcgatgtcacactcaagcgtcggcccaccgtcaaagatgtcgatatagttacggtagcgaaaaccttctttctccagcaccgcgcgggcaggcgcggtttgcggatgtacctgaccgatgacgtcctgggcttcctgggataaaaagtgggtatagatcggatgtttcggcatcagttctgcaataaatgccttttgcccggtgccgcagagaaaatcggcgcggctaaaatccatgctaaagaagcgtttaccgaggctttgccagaacggactatagccgtgttcgtcaatcaccccgcgcatttcagcaaccactttgtcattaaacttgtcgcgaaaagccgccataaacataaagcggcttttgctcagcaaatagccgttgccctctttgcgccagtccgggtcgagaaacagcgtgcacagctcgctgctgccggtgtgatcgttactgagaaacagcgtcggcaatgcgttatagacattcagctctttactggcgtgaaccaacgtgccgacgcgatagttgtaccagggatcgttcagcccaaccgccacctcaatggcacaaatccccgccacggtgcctgtctcgctatcttccagcacgaacacatagccctgctcacttttgggcagttcgccttgccaggttttgattgccctttcgatacgcgcgctaagcgtggcttcattggcgggaaggctcgtcaggccgccgcccgttttgctggcaagctgcatcagcgcgctgacatcacttcgctcaacgggacggatgaccatcatgatgaacctcggctaacaaattatttcaactactacctcggctaacaaagtgttcgcaagcagctgcaaagcgatccagtccggtcgtcacctcttcttcgctgacattgagcgcaggcgcaaaacgcaccacgttgccacccgcaatcagtaccatcacgcctgctttcgccgcttcctgagagatctgtttcgcttgcccggcgtaatcggcattcagtacacagccaatcagcaaacctaagccgcgaacttcactgaacaaaccatagcggtgattaatagtattaagacgctcaacaaaccagtcgtgacgctgtttaacgccattaagcatctctggtgtgttgatgagctccagcactttgcctgccaccgcgctggccagcggattaccgccataggtggtgccatgagtgccaacggtcatcacgcgggcgcactcttcggttgccaacaacgcaccgaccgggaaaccgccgcccagcgctttggcggtagttaacagatcaggcgtcacgccgtagtgcatataggcatacagttccccggtgcgcccgacgccggtttgtacttcatcaaaaatcaacagcgcattgtggcggttacacaattcacgcagaccttgtaaaaacgcgttgctggctggcaccacaccgccttccccctggatgggttcgacaatcaccgcacaggtagagtcgtcaatcagcgcgctggcagagttaatatcgttatatgcagcatgacgaatatccgccggcagtggcgcaaaatcctgactataggctggctgcccacccgcactgacagtaaacagcgtgcgaccatgaaacgcatttttgaacgccacgatgccgctcttatggctgccgtagcggtcgtgagcgaatttacgcgccagttttagcgccgcttcgttggcttccgcaccggagttacaaaagaagacgcgatcggcaaacgtggcgtcgatcaattttttcgccagtcgcagtaccggctcgttggtgtaaccgttgccggtatgccagaacttactcgcctgttcgttcagcgcttcacgcagttccggatgcgcatggcccagcgcgttcaccgcaatgccacccgcgaagtcgatatactctttcccctgctgatcccacaagcggctaccttcgccacgtaccggtataaagggtgccggagcgtaaacaggtatcatccattcatcaaagttttcacgcgtaattggctgagacatagcgacctctacagtaaataattcgttatttatatgttaataataagtaatgtttgcgctgtaaatgtagattgcagggttcgtgccagccagtgataaaagtgcataaacggcggaggctaactggaaatcaaggagttataaccaaaccatatgcatttaaagtgcatataaagtgaatacgtttgcgatgtgggtgaataaaaagaataaaaaacgcaatgttatgcagaagtaaaatataattctggaattgtgatcattgacgaaatttactggaaattactgcgccattctgacgcagcgcgcaccaaaagcgggcatttttttgcgccatcgttgacatcattaacaaccatcgatcaaatcacttaacaacaggcggtaagcaacgcgaaattctgctaccatccacgcactctttatctgaataaatggcagcgactatgaaatttgtctcttttaatatcaacggcctgcgcgccagacctcaccagcttgaagccatcgtcgaaaagcaccaaccggatgtgattggcctgcaggagacaaaagttcatgacgatatgtttccgctcgaagaggtggcgaagctcggctacaacgtgttttatcacgggcagaaaggccattatggcgtggcgctgctgaccaaagagacgccgattgccgtgcgtcgcggctttcccggtgacgacgaagaggcgcagcggcggattattatggcggaaatccccagtctgctgggtaatgtcaccgtgatcaacggttacttcccgcagggtgaaagccgcgaccatccgataaaattcccggcaaaagcgcagttttatcagaatctgcaaaactacctggaaaccgaactcaaacgtgataatccggtactgattatgggcgatatgaatatcagccctacagatctggatatcggcattggcgaagaaaaccgtaagcgctggctgcgtaccggtaaatgctctttcctgccggaagagcgcgaatggatggacaggctgatgagctgggggttggtcgataccttccgccatgcgaatccgcaaacagcagatcgtttcagttggtttgattaccgcagtaaaggttttgacgataaccgtggtctgcgcatcgacctgctgctcgccagccaaccgctggcagaatgttgcgtagaaaccggcatcgactatgaaatccgcagcatggaaaaaccgtccgatcacgcccccgtctgggcgaccttccgccgctaatttagcagctctcctggctcaaactgggtcaggagaattaaccttgagaaaaatcaacaaactgtcagtaatgatttgttgcctgccgtcctttgttataccgtctctgcgtttttagttgtctgaccacttctctattatcaagtttgatataggaaactccacgatgaacgctgagcgtaaatttctttttgcctgtcttatttttgcgctggtcatttacgctatccacgctttcggtttattcgatctgctcaccgatttaccccacttacagacactcatccgccagagcggatttttcggctatagcctctatattctgttattcatcattgccaccctcttgctgttaccaggaagcatactggtgatcgcgggaggaatagtttttggcccgctcttagggacactactcagtttaattgccgccacgctggcctccagctgcagtttcctgctggcgcgctggctgggacgtgatttactgctgaaatacgttggccatagcaataccttccaggccattgaaaaaggcattgcgcgtaacggtattgattttcttattctgacccgcttaatcccgttgtttccttacaatattcaaaattacgcttacggattaaccacaatcgccttctggccttatacccttattagcgcactcacgaccctacccggtattgttatttataccgtgatggcaagcgatctcgccaatgaaggcattacgctgcgctttattttacaactctgtctggcgggcctggcgctgtttattctcgtccagctcgcaaaactctacgcccgacacaaacatgtggatctgtctgctagccgccgcagcccacttactcacccaaaaaatgaaggataaaacgatgttgcaacattatagtgtgagttggaaaaaaggactggctgcactctgtttactggctgttgctgggcttagcggctgcgatcaacaagagaatgcggcggcaaaagtggaatacgacggacttagcaacagccaaccgctgcgtgtcgatgccaataaccatacggtaaccatgctggtgcaaattaatggtcgtttcctcaccgacgacactcgtcacggtattgtgtttaaagatggctccaacggacataaaagcctgtttatgggttatgcgaccccgaaagcattttatgaagccctgaaagaggcaggtggtacgccgggcgaaaacatgacgatggataataaagaaacgactcatgtcacaggcagcaaactggatattagcgtcaactggcaaggggcggcaaaagcgtattccttcgatgaagtgattgttgacagtaatggcaagaaactggacatgcgctttggcggtaatttaacggcagcagaagagaagaaaacgggttgcctggtgtgtctggatagctgcccggtcggcatcgtcagcaatgcaacatacacttatggtgcggttgaaaaacgtggtgaagttaaattcaaaggcaatgccagtgttctcccggcggataacacgctggcaacggttacctttaaaatcgccgaataaagccaggataaaggatgatgatgatgcaaagccgaaaaatctggtactaccgtataaccctcatcatcctgttgttcgctatgctgctggcatgggcgctgcttcccggcgtccatgagtttatcaatcgcagcgttgcggcgtttgccgccgtggaccaacagggtatagaacgctttattcagtcttacggcgcactggcggcagttgtcagcttcttgttgatgattttgcaggccattgctgcaccgctacctgcgtttttgatcacctttgccaatgcgagcctgtttggcgcgttctggggcggcttgctgagctggaccagtagcatggccggcgcggcgctgtgcttttttatcgccagagtgatgggccgcgaagtggtggaaaaattaaccggcaaaaccgtgcttgacagtatggacggctttttcactcgctacggcaaacacaccattctggtctgtcggttattgccttttgtccctttcgatccaatcagctatgctgccggtttgactagtatacgttttcgcagcttttttatcgccaccgggcttggtcagttaccggcaactattgtttattcctgggcgggcagcatgttaacaggcggtactttctggtttgtcaccggactgtttattctgtttgccctgaccgtggtgatttttatggcgaagaaaatatggcttgaacgccagaagaggaatgcctgatgggtttaccgccgcttagcaaaattcctttaattttacgtccacaggcgtggctgcatcgtcgccattacggcgaggtgctaagccccattcgctggtgggggcggatcccgtttatcttttatctggtgagcatgtttgttggctggctggagcgtaaacgcagtccgctcgatccggtagtacgaagccttgtcagcgcgcgcattgcgcaaatgtgcctgtgtgagttttgtgtggatatcaccagtatgaaagtcgccgagcgcaccggcagcagcgataaactgctggcagtggctgactggcggcaaagcccgctctttagcgatgaagaacggctggcgctggagtacgccgaagccgcaagcgtaacgccgccaacggtcgatgatgccctgcgtacccgactggctgcgcattttgacgctcaggcgctcaccgaactgacggcattgatcggcctgcaaaatctgagtgcccgttttaattctgccatggacattcccgctcaggggctgtgccgtattcctgaaaaacgttcttaaggagagatgatgcgccattgtgggtggttgctgggattgttaagcctgttttctctggcaacacatgccagtgactggcaagaaattaaaaatgaggccaaagggcaaaccgtctggtttaacgcctggggcggcgataccgcaattaaccgctatctcgactgggtgagcggcgagatgaaaacccattacgctataaacctgaagattgtccgtctggcggatgccgcagacgcggtgaagcgcattcagaccgaagccgcagccggacgtaaaacgggcggcagcgtggatctgctctgggtgaacggcgaaaacttccgcaccttaaaagaggccaatttattacaaacgggctgggcggagactctgcccaactggcgctatgtcgacacacagctgccggtgcgggaagatttttctgtgccgacacaaggtgcggaaagcccctggggcggcgcacaactgacgtttatcgcccgccgcgatgttacgccacagccaccacaaacgccgcaagccttactggagtttgctaaagccaatcccggcacggttacctatccgcgcccaccggactttaccggcacggcgtttcttgaacagttgctgattatgctgacgcccgatcccgccgcattaaaagaagcgccggacgatgcgactttcgcccgtgtcactgctcccttgtggcaatatcttgatgtgctgcatccgtatttgtggcgcgaaggaaaggatttcccgcctagtcccgcgcggatggatgctctgctgaaagccggcacattgcgcctgagcctgacctttaaccccgcgcatgcgcagcaaaaaatcgccagcggcgatttgcctgcaagcagttacagttttggctttcgcgaggggatgattggcaacgtgcatttcgtcaccattcctgccaacgcgaatgccagtgctgcggcgaaggtagttgccaatttcctgctcagtcccgatgcgcaactgcgtaaagcagatcccgctgtctggggcgatccttctgttctcgatccgcaaaaactgcctgacgggcagcgcgaaagtttgcaaagtagaatgccgcaggatctgccgccggtactggctgaaccgcacgcaggttgggtaaatgcgctggaacaagaatggctacaccgttacggtacgcattaatctttttgctgtgggcgatggtggcggtgatttatgcaccgctgatcccggcagctctcacgctgataagccctgctttgagcttgacacactggcaggcgttatttgccgatccacagttaccgcaggcattactggcaacgctggtgagcacaaccatcgcggcggtcggggcattgttgattgccctgctggtgattgtggcgctgtggcctgggccgaaatggcagcgtatgtgcgcccgtctgccgtggctgctcgccattccccatgtggcttttgccaccagcgcccttctgctctttgctgacggagggctgctttatgactatttcccgtatttcactccgccaatggaccgatttggcatcggtctgggcctcacccttgcagtgaaagaaagcgcatttctgctgtggatcttagcagcagtattgagcgaaaaatggctgttgcagcaggtcattgtgctggatagcctgggctacagccgctggcaatgcctgaactggctgctgttgccctccgtcgcgcctgcgctggcaatggcgatgctggcgattgttgcctggagcctgagcgtcgtggatgtggcaattattctcgggccaggtaatcccccgacgctggcggtaattagctggcagtggttaacccagggcgacattgaccaacaaacaaaaggcgcgcttgccagcctgctgttgatgctgttactcgccgcctacgttttgctgagctatctgctatggcgcagctggcggcgcactattccccgcgtagatggcgttcgcaagcctgccacgcctttattgccgggcaatacgctggcgatttttttacccttaaccggtgtgctgtgtgtggttctgctggcgatcctcgcggatcagagcacgatcaatagtgaagcgctcatcaacagcctgacaatggggctggtggcgacattcatcgctttgctcctgttactgctgtggctggaatgggggccacagcgtcgccagttgtggctatggttgcccattttattacctgctctgccactggtggcgggccagtacacgctggcgctatggctgaaactggatggaagctggacggcggtggtctgggggcatctgctgtgggtgatgccgtggatgctgtttatcctgcaacccgcctggcagcgcattgatagtcggttaattttgattgcgcaaacactgggctggagccgggccaaaatcttcttttacgtgaaatgcccactcatgttgcgccctgtgctgattgccttcgcggtgggatttgcagtcggtattgcgcagtatatgccaacgctgtggctgggcgcggggcgttttccgacgctcaccactgaggcggtggcattaagcagcggcggcagcaacggtattctcgccgcccaggctttatggcaactgctattaccgcttattatttttgccctgaccgcgttagtcgcaaaatgggtaggttatgtcagacaaggactccgctaatgctctgcgtgaaaaatgttagcctacgtttaccagaaagccgcttgctgacaaacgttaactttacggtggataaaggtgacattgtcacgttaatggggccgtctggctgtggaaaatccactctgtttagttggatgattggtgcactggccgaacagttttcttgtacaggtgagctatggctcaatgagcaacggattgacatcctacccaccgcacagcgtcagattggcattctttttcaggatgcactgttatttgaccagttcagtgtcgggcaaaatttactgctggcgctaccggcgacacttaaagggaatgcccgacgtaatgccgtgaatgatgcacttgagcgtagtggccttgagggagctttccatcaggatcctgccactttgtctggcggtcagcgagcgcgcgttgctctactacgcgcccttctcgcccaaccaaaagcgttactcctggatgagccattcagccgtcttgatgtggctctgcgcgataattttcgccagtgggtgttcagcgaagttcgcgccctggcgatccccgtcgttcaggtaacgcacgatctccaggatgttcctgctgatagttctgttctggatatggcgcagtggagtgaaaattacaacaaactgcgataacgcaaagtttttctcaatgcgtcagttcagaatggcgcactcaaaactacaatgtcgggattttcgatgaaacgtgtttctcaaatgaccgcgctggcaatggctttagggctggcttgcgcttctagctgggccgctgaactggcgaagcctcttacacttgaccagcttcaacaacaaaatggcaaagcgatagatactcgccccagcgcgttttataacggctggccacaaaccttaaatggcccttctggtcatgaacttgccgccttaaacctctctgccagctggcttgacaaaatgagcaccgaacagctcaacgcgtggatcaagcaacataacctgaaaaccgatgctccggtggcgctgtacggtaatgacaaagatgtcgacgccgtcaaaacgcgactgcaaaaagcaggtttaacgcatatctccatcctgagtgacgcgctaagcgaaccttcccgtctgcaaaaactgccgcattttgagcagctggtttatccgcaatggctgcacgacctgcaacaaggtaaagaggttacggcgaaacctgccggtgactggaaagtcattgaagcggcctggggcgctcctaagctttaccttatcagccatattcccggcgctgactacatcgataccaacgaagtggaaagtgaaccgctgtggaacaaagtttctgatgaacaactaaaagcgatgctggcaaaacacggcattcgccatgacaccacggtcattctgtatgggcgtgacgtatacgctgcagcgcgtgtggcgcagattatgctttatgctggtgtgaaagatgtgcgcctgctggatggcggctggcaaacctggtccgacgcgggactgcctgttgagcgcggaacgccaccgaaagtgaaagcggaaccggatttcggcgtgaagatcccggcacaaccgcagttgatgctcgatatggaacaggcccgtggactgctgcatcgccaggatgcaagcctggtgagcattcgtagctggccagaatttatcggtacgaccagcggttacagctatattaaaccaaaaggtgaaatagccggcgcacgttggggacacgctggtagcgacagcacgcatatggaagattttcataacccggatggcaccatgcgcagcgccgatgatattaccgctatgtggaaagcgtggaatatcaaaccagagcagcaagttagtttctactgcggcaccggctggcgcgcgtccgaaacctttatgtacgcacgcgccatgggttggaagaatgtttccgtgtatgacggcggctggtacgaatggagcagcgatccaaaaaatccggtagcaaccggtgaacgcggcccggacagtagcaaataacattgcaattactgacgctggaggctcttcagcgtcagatacccactccacacccgcgtaaaggtcgtcatccagcacaacgcaccgaagatccacgcaaaccacgcaaaccatgcagggaataaacatcccagcacaaacagtaagatcgtttctgtgccttcggttaatccccccagatagtaaaagctcttatgtgcataaccggggttatcaatctgatgttttgctgccagtgcagcaaaggcgagaaaactgctgcccgtgccgataaacgcaaacaacaaccagccgcctgccagcgcattttgctccggtgcagcaagaataaagccaaacggcaccagcgcgtaaaagagaaaatcgagagaaatatcaagaaagccgcccgcgtcggtaagctctctgcgccgcgccagcgcaccgtccagaccatcaagcagcctgttcaacaaaatgacgactagcgccgccagataccagcccagcgccagaaacggcagagccagcacgccgatggcaaatcccactaatgttaaaccatctggcgtaatgcccggtttatcaagaacccgcacgcactgatgcaacaacggtttaatccggggatgaagatggcggtctagcacaggcactccttaaatataaagcctttctgattgagcaacagtgcggatattatggcatttttcgcttatctgcccgtgtgtaatttatgaaaatgattgaagttgttgccgccatcattgaacgtgatggcaaaattttactcgcgcaacgccccgcccagagcgatcaggcgggattatgggagtttgccggtggtaaagtcgagccggatgaaagtcagcggcaggcgctggtgcgtgagttacgcgaagaactgggcatcgaagcaactgtgggtgaatatgttgccagccatcagcgagaagttagcgggcggattatccatcttcatgcctggcacgtacccgacttccacgggacgttacaggcacatgaacatcaggcgctggtctggtgcagtcctgaagaggcgctgcaatatccgctggcccctgctgacattccattattagaggcgtttatggctttacgcgccgccagaccagcggattaattatggctttacgcgccgccagaccagcggattagtgctaagggttttgtcatcacgctggcattgcagcagtattccttcggctttaattaccgccccttcagaataattttgatcctgataaacgcagcactgagtacagggctgcgcactctgcccgccactactgaacacttctggcggtacgtttacctccacgtccggacgataatgcgggttagccagtgcaattaatggaaatgctaatactacggcgaacaatgctcgactcacagggaactccttaacgttattgtctctgctactgataacggtagccgggtggcaaaactttagcgtctgagttatcgcatttggttatgagattactctcgttattaatttgctttcctgggtcatttttttcttgcttaccgtcacattcttgatggtatagtcgaaaactgcaaaagcacatgacataaacaacataagcacaatcgtattaatatataagggttttatatctatggatcagacatattctctggagagtttcctcaaccatgtccaaaagcgcgacccgaatcaaaccgagttcgcgcaagccgttcgtgaagtaatgaccacactctggccttttcttgaacaaaatccaaaatatcgccagatgagtttactggagcgtctggttgaaccggagcgcgtgatccagtttcgcgtggtatgggttgatgatcgcaaccagatacaggtcaaccgtgcatggcgtgtgcagttcagctctgccatcggcccgtacaaaggcggtatgcgcttccatccgagtgttaacctttccattctcaaattcctcggctttgaacaaaccttcaaaaatgccctgactactctgccgatgggcggtggtaaaggcggcagcgatttcgatccgaaaggaaaaagcgaaggtgaagtgatgcgtttttgccaggcgctgatgactgaactgtatcgccacctgggcgcggataccgacgttccggcaggtgatatcggggttggtggtcgtgaagtcggctttatggcggggatgatgaaaaagctctccaacaataccgcctgcgtcttcaccggtaagggccttagttttggcggcagtcttattcgcccggaagctaccggctacggtctggtttatttcacagaagcaatgctaaaacgccacggtatgggttttgaagggatgcgcgtttccgtttctggctccggcaacgtcgcccagtacgctatcgaaaaagcgatggaatttggtgctcgtgtgatcactgcgagtgactccagcggcactgtagttgatgaaagcggattcacgaaagagaaactggcacgtcttatcgaaatcaaagccagccgcgatggtcgagtggcagattacgccaaagaatttggtctggtctatctcgaaggccaacagccgtggtctctaccggttgatatcgccctgccttgcgccacccagaatgaactggatgttgacgccgcgcatcagcttatcgctaatggcgttaaagccgtcgccgaaggggcaaatatgccgaccaccatcgaagcgactgaactgttccagcaggcaggcgtactatttgcaccgggtaaagcggctaatgctggtggcgtcgctacaagcggcctggaaatggcacaaaacgctgcgcgcctgggctggaaagccgagaaagttgacgcacgtttgcatcacatcatgctggatatccaccatgcctgtgttgagcatggtggtgaaggtgagcaaaccaactacgtgcagggcgcgaacattgccggttttgtgaaggttgccgatgcgatgctggcgcagggtgtgatttaagttgtaaatgcctgatggcgctacgcttatcaggcctacaaatgggcacaattcattgcagttacgctctaatgtaggccgggcaagcgcagcgcccccggcaaaatttcaggcgtttaactgtatttaacggaacttgctccccacggaacatttcttatgggccaacggcatttcttactgtagtgctcccaaaactgcttgtcgtaacgataacacgcttcaagttcagcatccgttaactttctgcgatagcagcagatatgccagtaaagaaatcccatttgactatttttttgataatcttcttcgctttcgaacaactcgtgcgcctttcgagaagcaagcattatataatgccaggccagttcttcttcaattgtcccgttttgaaaagctgtgctacttatgctgatcatccaacttaattccgccgcccatattagcttcgcgctggatttaccggagctatgattagcgcaatcagagatatagtcactgggaaaaacagcaaatttattcaacaaggcgataacctgctctggggcttcctccatgtttgctttaaaggtattggctccatggtcgccagaaagaaaatgctccattaaggcacaataactttcgctatcttcgataccccattgatcctctaaagactcgcgtcttttacttatgatatcgatgctgtcaaaaggaagcacatgatattggaaggtatctttgccaggttcaggctttcgcggccagaactccagcgtttcagaccattgcttatgatagaatcgataaggtgcgatcaattgtagcgcctgtaacttctcgatactgagcggctcaatacctttagcctgataataatgcagttgttctttttttgctttaaaaccggcccgaacaataagccccatcataattaatagataaagaaaagagcatcccgcggtaatcaggcctctttcattcaaaccgttggatgttatcgctgcgaacacaaacattacagcgacaacacatgttaaataaaacccccacttacaaagcagcatggccttattttctttaatcatccgttcaaaattactattaaatatttcccagccattaaaagaatacttctcgctcccaggatggttttgtaataaaacttttttcatcacattccctgttattacatactttagaggcgataattttatccatgcaaaaaaaatatccaacgaattttcttgatccgctggatatttcagaatatgactcgaatagcacgaaagattcactcgcttacgctatcgccccgcttccgacttcatctgctggcggactttttttcgcactacgtttacgcggtgcagcctttttcttatcagcactgccaccactgcccggagccacaatgccgcgaaactgccgcaccggcgtacgtttggcttgatcaataagctgatatagcgtccccaccagcggctgcataaagtcctgatagcgacactgcttttcgctgatttgcgtcagcacgctttcccagtgcgcggtcatgtccggtcgcgtcgccatctccggcaggctatggaatagcgcttttccggcgtcggtggagtggatatagcgcccttttttggtcaggaaaccacgcttgaacaacagttcaataatcccggcacgcgttgcctctgtccccagaccatcggtcgcacggaggatctttttcagatctttatcctgcacaaagcgcgcgatcccggtcatcgcgctaagcagtgttgcatcggtaaaatggcgcggcggctgggtttgccgctctaccacttcacctttttcacacagcaactcatcgcctttcgccaccacaggcagtggcgtgccgtcgttttcttcatcgcgctctttgctgcctaacagcgtgcgccagcctgcttcagcaagaaaacgcgctttagcgacaaatttgcctttggcaatgtccagttcgataacacacttgcggaacaccgcatccgggcagaattgcatcagatactgacgggcaatcaggttatagaccttcgcttcgttctccgtcaggttgatcgcagaactccgtgcggtcggaatgatggcgtggtgcgcatcgacctttttgtcatcccaacagcggttgcgtatatctggatctaccactggctgcggcaacagatccggtgcatgaacactgatggcattcatcaccgcgtggcgtccggcaaaatgttcttctggcaaatagcgacaatcagaacgcggataagtgattagcttgtgcgtttcgtacagtttctggcagatatcaagcacgttctgcgcactcagaccaaaacgttttgccgcttcaatctgcaacgcactaaggctaaaaggcagcggcgcggattcactttcccgtttatcgttatagctggtgacaatagccggttgaccactaatgcggttaaccacatgctccgccagtggacgatgtaacaagcgcccttcttcatcctggtacggttcacacgcttcgctcggttgccagatagcggtaaaccgctcatcggcaggtgtcacgatatgtgctttgacttcaaagaagtctttcgccacgaagttttcaatctcttcatcgcggcgcaccaccagcccaagcacgggcgtctgcacgcgtcccacggaaagtacgccctgataaccggcattgcgaccgagaatggtatacgcacgggtcatattgatgccgtacagccagtcggcacgcgctcgcgccagcgcagaaacgcacagcggtacaaactcactgttggaacgaagacggtcgatcgcccgctcaaccgcctgcgggttcaggtcgtttatcaagcaacgctgtacctgctggcgcttttccggtgccagttgcagatagtccagcacttcatccaccagcaattgcccttcacgatccgggtccccggcgtgaacgatttcgctggcttcatgcaggaaccgtttgatgacgttaagttgtttggtcacggagggtcggggctgtaattgccacttttccgggacaatcggcaaatccgcaagattccagcgcgcatagcggctgtcgtaggcgtctggctgcgcctgctcaagcaggtgaccgatacaccaggtcaccacctgaccattaccgcactcgataaagccatcgcctttccggtgcggtttgggcaggacatcagcaatggcgcgcgccagactcggtttttcggcaataaacaaccgcattgaattaacgaatctcaaccatggcacgaccgccgcgcgctggcaccagttcgccaattgccgtcagttcaatgccaaactcggcggctgtagctttgacctcattttctgcttccggcatgaccgccagcagcaaaccgccagaagtttgcggatcacacagcagatcgcgcacttcacgcggcatttcacccatcagatgaccgtagctggcaaagttacgttcagtgccgccaggtactgcgcccaacttaatgtactcttcaacaccggggagtttcgggatcgcttcatagtcgacgcgtgcctgcacaccagccccctgacacatttcgctcaagtggcccagcagaccaaagcccgtaacgtcggtcatcgcttttacgccttcgatgttggcaaaggacgcgcctgcgatgttcatccggcacatcacttccgtcgccagtccctgatgttctggtttcaacagactttttttctcagccgtggtaagaacgccgatccccagcggtttcgtcaggaacagtttgcatccggcttgtgcggtactgtttttcttcacccgctcggtcggtacgatccccgttaccgccagaccaaaaatcggctccggcgcatcgatggagtgaccgccagccagcgcaatacccgcctgacgacatgcatagcgtccaccttcggtcacttcgcgggcaatttctggggaaagtttgttaatcggccagccgaggatcgcaatcgccataatcggtttgccccccatcgcgaagatatcgctgatggcgttagtcgccgcaatgcggccaaaatcgaaaggattatcaacgatcggcataaagaagtcggtggtactgataacgctggtgccattgcccagatcgtacaccgccgcatcgtcgcgggtttcattacccacaagcaaattcggatcaacaaacttcgcctgctcactatgcaggatggtttccaacacttttggggaaattttacagccgcaaccagctccgtggctgtattgggtcaaacgaatgctgttctcgctcatggacatctcctgtcaatgcaatccgggtatggtaaccctcattccgtgaagtgataagtgagagtgtctgaattcctgcgcctttgctcacaatccagacagtttcgcgacaattatcagaaataagttacaaacggcgtcgggtccgggacgttaatgctcgtagatgctttcagctgcggcgtaccgaggtagagaaaaccgacaattttatcctgctcacggcaaccgaatgcttcacgcactaccggactttcagttaatgcgccactgcgccagatgccgccaaacccctgggcaactgctgccatttgcatcgccatgaccgcgcatccggcagacatttcctgttcccagcgcgggactttatgattctcttcgcatttcgccaccaccgtgatgatgagcggtgcgcggaacggcgcattacgggctttgtcgatagctttgtcatcactaccggcagcaatcgccccctgttccagtacggcgctgaaacgctcgcgcccttccccttcaatcacaaaaaaatgccacggttgcatggacttatggtccggcgcacgcatacccgcacgcaggatgttttgcagttgttcacccgttggcgcgggttcagccaagcgggaggcgctacggcgattgatcaatagttcgagtgcatccatttgattaactcctgtcgtgatatttattcacaaaattaacacgagagtggattttgttacagcacagtccgcaattcctgctgacaagtaccggttgggtcattacgataaccacatctattgcgcctgtgacaggtgtgaccttaagttgggagaatacatgcgaaccctttggcgatttattgccggattttttaaatggacgtggcgtctgctgaatttcgtccgtgaaatggtacttaacctgttctttattttcctcgtactggttggtgtggggatttggatgcaggtcagtggtggtgatagcaaagaaacggccagtcgtggcgcactgctgctggacatttctggtgtgatcgtcgataaacccgacagttctcagcggtttagtaaattaagccgccagctgcttggtgccagttccgatcgtctgcaggaaaacagtctgtttgatatcgtcaacactattcgccaggcgaaggacgaccgcaatatcaccggtattgtgatggatctgaaaaacttcgcaggcggcgaccaaccgtctatgcagtacatcggcaaagctctgaaagagtttcgtgacagcgggaaaccggtttatgccgttggcgagaactacagccaggggcaatattatctcgccagtttcgccaataaaatttggctgtctccgcaaggcgtggttgatctgcacggctttgccaccaacggtctgtactacaaaagcttgctggataagctgaaagtttccacccatgtgttccgcgtgggtacgtataaatctgccgttgaaccgtttattcgtgatgatatgagtccggcagcccgcgaagctgacagccgctggattggtgagctgtggcaaaactatctgaatactgttgccgctaaccggcagatccctgctgagcaggtattccctggcgcgcaagggttgcttgagggtttaaccaaaaccggtggcgataccgcgaaatatgcactggaaaacaagctggtcgatgcactggcaagcagtgcggaaatcgaaaaagcactgaccaaagaattcggctggagtaagactgataaaaattatcgcgccatcagttattacgattacgcattgaaaacgccggcagataccggtgacagcatcggtgtcgtctttgctaatggcgcaattatggatggcgaggaaactcaggggaatgttggcggtgataccactgcggcacaaatccgcgacgctcgccttgacccgaaagtgaaagcgattgtcctgcgtgttaatagcccaggcggcagcgttaccgcgtctgaagtgattcgcgctgaactggcagcagcccgggcagcgggtaagcctgtggttgtaagcatgggcggcatggcggcatctggtggttactggatttccacgccagctaattacattgtggctaaccccagcaccctgaccggttctatcggtatcttcggcgtgatcaccaccgtagaaaatagtctggatagcattggtgttcatactgatggtgtcagtactagtccgctggcggatgtttctatcaccagggcactgccgccggaagcgcagctgatgatgcagttaagcattgagaatggctataaacgctttatcacgctggttgctgatgcgcgtcatagcacgccggagcagattgataaaattgcccagggccacgtctggaccggtcaggatgcaaaagctaacgggctggtcgatagtctcggggatttcgatgatgcggtcgccaaagcagcagagctggcaaaagtgaaacagtggcatctggaatattacgttgatgaaccgaccttcttcgacaaagtgatggacaacatgtctggttctgtccgggcaatgttgccagatgcgttccaggccatgttacctgcaccgctggccagcgtagcctctaccgttaaaagtgaaagtgacaagctggccgcgtttaatgacccacaaaaccgttatgcgttttgcctgacctgcgccaacatgcgttaagtcttgtactgagtggccgacagatcgtcggccacattattttttacgtcgacgaatcctcttcccgctgtttcgccccatatttccttatccgcatagtatcaggtgcgctccccctgcctcacgtatatacttttgctctttcgatatcattcatatcaatatcatgcaaaagaaaagtatttacgttgcctacacgggcgggaccatcgggatgcagcgttccgagcagggttatataccggtgagtggtcatctacaacgccaactggcgctgatgccggaattccatcgcccggagatgccagatttcaccattcatgaatatacgccgctgatggattctagtgatatgacgccggaagactggcagcatattgctgaagatattaaagcgcactatgacgactatgatggttttgtcattctgcacggcaccgacacgatggcgtataccgcctctgcgctgagcttcatgctcgagaatctcggtaaaccggtcattgtgacagggagtcaaatcccgctggctgagttacgctctgacggacaaattaatctgctgaatgcgttgtacgttgcggcgaattatccgatcaacgaagtaacgctctttttcaataaccgattgtatcgcggcaaccgcactaccaaagcccatgccgatggttttgatgcgtttgcctctccaaaccttcctccgttactggaagcaggtatccatattcgtcgtttgaatacgccacccgccccgcacggtgaaggggaattaatcgttcatccaatcaccccacaaccaattggcgtagtgacgatttatccagggatttctgctgacgtcgtgcgcaattttctgcgccaaccggtgaaagcattgattctgcgctcctatggcgtgggtaatgcgccacaaaacaaagccttcctgcaggaattacaagaagccagcgatcgcggtattgtggtggtcaacctgacacaatgtatgtccggtaaagtgaacatgggtggttatgccaccggtaacgccctcgcccatgccggcgtaattggcggtgcagatatgactgtagaagccacgctaaccaaactgcattacctgcttagccaggaactggatactgaaaccattcgcaaggccatgagccaaaacctgcgcggcgaactgacgccggatgattaaggagactgtaatgccccctcgcgccctgttactggtcgatttacaaaatgatttctgtgctggtggcgcgctcgccgtgccggaaggtgacagtacggtggatgtcgctaaccgcctgattgactggtgccagagccgcggtgaagcggttatcgccagtcaggactggcacccggcgaatcacggcagttttgccagtcagcacggtgtagagccttatacgccaggccaactcgacggtttgccacaaaccttctggccagatcactgtgtgcagaacagtgaaggcgcacaattacatccgttactgcaccaaaaagcgatcgcagcggtgttccataaaggcgaaaatcctttagttgacagttacagtgccttttttgataacggccgtcggcagaaaacctctctcgatgactggttacgcgatcatgaaatcgatgaattgatcgttatgggcctggctactgactattgcgtgaagtttaccgtgctggacgcgttacagttaggttataaggtaaacgtgattaccgatggttgtcgtggcgtgaatatccagccccaggacagtgcgcacgcgtttatggagatgagtgcagctggggcaacgctatatacgctggcagactgggaagagacacaggggtaattttacgctggcctacaattctgtactggcattgtaggccaaataaaacacgtcagtggcacatctggcaattgatgccatcaacgaaagatttaattcacctcagaaatctcttccaagctcaccttccgcgtttcgatgccaaaaatggagagaaccagcgcacagagcaataacataacaccaagtaccataaacaccgtgatgctcccataatgtgttaataatgccgcaacgccatagggcgtgaagactgcgacgatccgtccgacggcattaacgaaaccgctaccgcgcaggcgtaaatgcgttggccaaagctccgggatataaaccgcgctcgcgaagcaaacatacatgtataaaaagaagatcatcaccagtccatagattaaaatcgcccactctgtagtctgaatactatagatatagcctaacacggcaataataataagtaaggtggagccaaataaccgacgaggaaaatgatcaataattaatgccgcaataaatattcctaccggagcgccaatcataataacagcggtcattaatatacttttatcgacatcaatgccggagttaacaaatatggtcggtatccatacggtgatggtataaaggctaatgttcattgcaattaaaacagtaatcgcgactaatgtacgtcgtaacatttcacctttaaacaggagccagaaagtacccttgattactttaaccttgctgttgctctgatagctagtaagcgggggtaaacgaatactcttctctctttcaatttgctgctctacttcacgaagttggcattctgcacctgcgatttgccctttccctgccagccatcgtgggctctcgataaagtatttaccactgagaaaccaggctaacagtatgccaataccacccagcagaaacattattcgccaactaaaaaaagcgataaccaccacgcctatcgccgcagacagcatggggctccagttaccaacaaaactgagccgcgcggaccattttccacgcaccgtcgcggggataaactccgtaaaactggcatagccaaccataatcagcgcccccattcctgttcccatcaggaagcgaaagaagatgagccagtacatatcagggacaaaagcggcccctgttgcagcaataccgacgatgagaagatttatgcgaaacgccctgcgccgcccaaagtagtcaccaataaacccaccagtaagactgccgatgaaataaccaaacattaatgcgctggtaaaggcggcattgaggaaattattactccatccattgcttaccagctttgctaagacgacattaccggagtaactcaaaaaccctgttaataacagactaaagcttataataccaaatatacgataatgaaaccgggccaaaggcaagcggtccagtcttgcgccaatttgatcatattgttccattaggtgcctcggatttgctaaaaaggtagcaattgcggcaaattcacttgccgcatctttatcatcattttatttcaaggcgcaggaacaaataatattgacaacgtgtgcttaaattaccacaccagctggatattattgtctttgcaaaatgctatccactctgcacccggacttttatcagttattatgtaattaatatgactaaaatcagctaactggacaaaagctttgcgatcaaacttagagtgatcaaccaataacgcaacttctgtcgcctgacggatcattgtctttttgatttcagcttccgcttcattagagtccagcgcgccgctgttaatatcaagacctttacaactcattaccatgatatcgacatgatagcgcctgatgatctctttagtaattcttccttgcagactaagtgtatttttgtttagttccccacccgtactaacgactttaatttcactctgagccagaacatgaatcgcttccgcgctgttggttagcaacgtcaggccactacggtcctgtaacaatttgagcaattccattacggtactactggaatcggctgccatggtggttttattgtcgataaagggtagtgccttgcgtgcaataagctgcttctcttcataaaagctactagcgcgcttataaaaatggatattctccgtcaacatcgctgtatttaaaacagcaccaccataggttctggtcaaaaagccttcatcttccagcttctcaagatcgcggcgaatggtttcttcggttacctgaaaaatcccactcaaattactgactgtcacctttttatcgttggcaaccatttgcttaattgcctgaatcctgtcttttgccgccacgattacacccctgtatctttttacatcacattagcgcgattatcgcataaccgatgtttactttcaaaataacctgtttgaatcacagattttcatcacagttttcacagaaacagaggtgaatcgtgttgagtatttaacgctccagggcctctgccatttccctcatcaatgttgcgtctgcatcgcttaagttgatattcagtgccgcgacattttcgcgtacctgttccggtgcagtagccccactaagaatggagattaaatcactctgttttaatatccacgccagtgccagagtgggaattgtgcactgataacgagcacaaagtggctgccactgttcaagcatatcaatcactttcagcatgttttcacgctggaaccagactttatttgcccgagcgccgcccggaacgtaatcacgagtgatggtgccggtcaacaatccctgctctagcggggaataaacctgaaccacaatgccattatcacgacatagtggcagcagttcgttttccattgcccggtcgaggatactgtatttcgcctgaataatatccagttcaccatattgcagatactcgcggatatggtcagcatcgacgttagcagcgcctatagcgcgaattttcccttcagactttaactcattaagcactgcgacagtttcagcgatcggcgtaaaaaatggcggcacgctctgccagtgcgtcatgtagatatcgatgtaatcaatacccagacgttgcaagctcgctgctacctcttcgcggatagattccggggaaaggtttttatacaactgccgatcgccaactttgttgaataaacttccttttcgttcccagacaatgccgcatttggtttctactacaacctgttcacggggcagtttttttaacgcctgaccgacgataacttcactattgccaaagttatatcctggcgcagtatcaatcagattaatgccacaacgatgggcttcaagaatcgtatcaatacatatttgccgatcgagatcgccattccatgcaggaccgccgccaatggcccatgtccccaaccccattcggctaagcgtaatatccgttgtgcctaaaggtatctttttcatttgccttcattatccttcgtattcttccagcaattgttcgaccagctttctgttttttacgccggtggtggcaccgacgcttagaacgctgatagccgccgttgcattggcaaagcgtgcgcattcacgcagatttttgccttctaacagtgccgcaataaaaccactagcaaagttatcgcccgcgccaatggtgtcgatggcggttattcctgcgaccgccggcaccttcatcgtcatgtcaccacgcttgataaagcagccgtctttacccgttttaatcaccaccgtttttacgccgcacgcaagaaagcagtcagcaatttcatccagtgtctctttcccggtgagtaattttgcctcggcaaaattaggaaacagataatcgacataactcaatgcttcgcaaatatcatccagcgtttcattcaaccgcggtttgatcatatcggcacagataatcatctgccgggctttagcttgcgtaaaaatttctgttagcgctttaccatccaatagtggactgttgaaaatactggccagacttaataatttcgcctgagaaaaccgcgcaaaatcaacatcgtcaatattcaatttccacagactgccattacggtttgtgacaaacgtccgctcgccatcctccgtcaccagtccaacgttaatagaggtatctatgctgacgtcctgcttcaggctttgaatatcaatattctctttgcggcaatggtcgagaataaattgccctgcggcatctttaccaatacgactcattaatgctgtgcgatggcccagacgagaaataattgttgcttcatttattgcatcacccccggtggtcattgcgattctttcaagaggataagaatccacatcaaagatatttttactgaccggttgcaatggaatatcaacaatagcggcacctatacaaataacgtcgagattatccatatcattattccgctttgccatcagaaccgaacagtttaattttttccaatgcccgttcttttacagctttacgtacttcacgttctaaatgcaggaaaggctgatcctggttttctttcactgcaaccattgcggcctgacagagctccgtatgaatgttgattttcgcgatacccaagctaattgcagttttaatgtcggcatcactgatcccgcttgcaccgtgcaaaaccagcggaacagaaacggcatcgcgtacgcgtttgacgacctcaaagttcaattgtggctcactcgtataaaccccatgctggttgccgatggcgacagccaaactatcacagcccgtacgttcaacaaattcagccgcctggtcaggatcggtatagtgatagcccgccagcgcttcctcataaacggtttcattaccgacatgccctaattccgcctctaccggaatacccagcggatggaagaaatcgacagcctctttggttaaacgaatattttcttcgaaatcaaacgcggaagcatcacgcattaaactattcataccatgagtccaggcgttatgaataatctccatactccgaccatgatcccaatgagttattaccggcaccgttgctttttgtgccatacttaccatcatgtgagagaaatcttcaaaactggtgttaccgacaaaacctgtaccaaaagaaataataaccggggatttcgcttcttcggctgcgtcgataacgcccatcaacatttctgcattccatacgttaaaatgggcaattgcataatgtttatttgtggcatcgttttcccaatatctgatatctgcgagcatgttctgttctcccgtattaattaatcgctaattttaataacgcctttaataatgtcgcgtttgttgttaacactctcttcaaatgcctgttgtacatcccgataatcgtaaatatgcgtcaccatgcttttcacatcgaatcgcccactagaaatagcttcaatcgtgaccggataacgattggcatagcggaataccgtctggatagtgacttcgcgattgattttgaggaaattgattgcgctatcgccgggtacagtaccaacaatcataattttaccgccgcgcattaccagataaggtgcctgtttaacggtgaccgcagaacccgctgtttcgaaaacaatatctgcgcccatgtcttcggtaaattgctgacagcgtgcaatagtgtcttcttttgcgccgttaataaccactgtcgcaccaagctgttccgccattgccagacgtttttccagcacatcaacgacggcaatttccgttgctcccaggcatttgcacgcttgcaacgtcatcaaaccaatacaacctgctcccagaataattatcttcttacccggtttaacatctgccagcatcgcggcatgcatcccgactgcggcaggctccaccagcgccccttccatcgtgtccatattgtcgggcagtttgtaagtaaagctctccggatgacacagatagtgcgttaatgcgccgcggtagttgggttgtgtcgccataaaatcaacgtccgggcagatgttatatttgccttccagacagtaacgacagtgaccgcaaggaacgccaggttcgatatttacccgatcccccggtttaaatttgcgcacgcggcttcccacagccacaaccgtcccggcgcattcatgacccaggccaatttcttgatttgggtctttaggcggaataaacgggccactttcaaaaccatgtacatcactaccacaaataccgacatattctactttaatcaaaacttcatcttctttaggcactggtatttctgcactaataattttcattgtgcccggcacctgcaatattgctttactatttttcattttgaatccacccgtattatttattggctactgcatcaatacttaaactttcaacggagacacctttggtttcgattccaatggtggcgatagcaattgcgacaataatactaaccgcccccagaagaataaagactcccgtaacgccataactactgagcagcactgcaacggcataaggtgcggcaataccactgattcgccctaccgcattcgccagaccggagccacggagtttggcctctgtcggccagatttcagggacatacactgcgctggcatagcaagcgtacatatagacgaaagtaatcaggaagaaaccaatcaacgttatgagcaacatactggtttgcagactatagatatatccgagcaccgcaatcaggattaatagccccacacccattgttttacgcggaattttatccatcaccagcatggcaataaaaataccaaatggcgcgccaaacatactcatggtatttaaaacaatgctgtcttttaaattaatcccctgggtcatgaatattgttggcaaccagttaattagtgtgtactgcacaacgttcatggcaatcagcacacaagagcctaatatcacgcgtttcagtaatactcctgtcagtaaggcactatacggcaccgcttgtggcgctttaccgtcatcagcaataaccacaggcggcaaaggtttacccgtctggcgtatgacgccttcttctatactccgcatgactttctcggcttcctgataccgtccgcggctttccagccagcgcggggattcaggaaagtagcgccaggccagcgccgtagcgataaggctcaatattgcagggataagcagttgtacccgccagttccactctgcactaatcagcggcgtgagtcccatcgctatcaaactacagagcggataactccagttgccaataaaggaaacccgactactccacgttccacgatttctaccgggcatatattcggtgaaaccagcaaacagcgtaaccagtaaagctcccagcccaactcccatcacaaaacggcaggcaataaggaaatccatattcggactgaaagcaccgacaaccatgctggcaatatgaatggcctcatagaggatgaacgcatttctgcgaccggttttgtcgccaatgatgccgcccaccagcgcaccgagaaacattccggcggtcgtgattgcactgaatgtggctgtggtggaattatctgtccagcccaacgctttcagctgcgcgaggatcaagccaccaacggcattactccagcagacaagcaagccaaacgcgacgatggcaaacatactactatgccagcggcaatccggtaagcgatccagccgtgcaccacaatgcggttttgttatctgttccatgcgataacgttccttcaggagagtggttattcatcaaagtcgtaagtcatgatcactttgattgcggttttatcgaccatcgcatcaaacccttcgcgccattggctcaggccgatacgatgcgtgatcatcggtttgactttgatagcgccgctggctaatagcctgatagcgttacgccaactggtggagtcataggccatatgcccaatgatgcttttgttccaggcggtaatgtcattaatgctgaaatcaagaggtttgaagcccattccaacgcgtaccacttccccgttcgggcggagcatttcgatggcttgtttcagtgcgatattggcaccggagcattcaatcaccagtcccagattgtctttgccacaaatttgctggcagcgcgccaccacatcttcggtagaaccatttactactgccgtcgcacccagttcttttgcaaccgggaagcggaccgccacatcttcttgcagaccaacgacgacgatatttaccgcccccataattcgcgccatttgtacggagaacagcccgagtgggccagtgccgatgacgaccacatcctgaccaggaaggaatttgctttgctgcgcgatggatttgtaggcattacagatagggtcaagtacggctgcgtcctcataatcaacaccatcagggatttcccacaacgcatgacgatgaattttgagaatttcaccaggaaccagacaatatttggaaaaaccaccgccccaggtattattatccagaccaaggtttactttttctgtacaacacagaaaatcaccttgttcacaggccggacaaacaccgcaaacgtgaccgctgttatcgcttacgacgcgttgccccactttccagtctttgactttttcaccaacctgcgcaatacaacctgcgaactcatggccgcggatagagttaaactcatcagaaccgctatcgacattgtagtgcttcatgtctgcgccgcagattgccgcggctttaatttcaatcactacatcttccgggccacacatgggttgtgggacatcaatcatcttgtagccgccaaaggccttgccaaaccgagccagtgctttcattgcgtcatcctctgtgtttagttttgcttagatggccatcatacttacccacatgatttttgaggtcaacattaaatctgtaaaacacagataatgatctgcgttttacaactcagatcacaattacgcagaaaatggctgggtctgttacaggttgatggaaggcggggcgcaaaaagagcaaattcgagagggattaccggccaaataggtctgagacttaagttcaggagaagtcattcaggtgtgaacgggacggcaagagatcggactgggacttagccaggtcatggcgagataattgagatgagtcgtggggtcattgttggctatccccttcatagccgaggcaaaaaggggatgaaccacttacttaaacatggcaataggctttgcactgataccaaaatcttcttttaactgctgtttgctcttcatgaccatctgaccatttgtgtcaattgtcatatgctgtgcttcgatattatggcgggcttgccacagcatcaccagttgcaggcagttctctttttgttcctcggtcaacgcaacgccatcaggccatttccccagttcaacggcggtgctcaaacgctggtatacctcaggcatcatgctgttgataatgtcatcaagattcataatttttccgctcctgtggaataagttgctgaatcgttttttcaaccgttgatttcttcgccgttttcgccatcggtaaagcgtaaagaggcagagttaacacaataacgttcgcccgttggctgcggcccgtcggggaagacatgccccagatgggcatcacagttaccgcaacgaatttctatgcgctgcattccatgactcaagtctttgatataacgaatggattcttcacttaccggttcgtagaaactgggccagccacagccggaatcatacttggtttgggaatgaaacagcggggcatcgcagatcaaacagtgatatacgccgtcacgcttgttatgcagtaaacgacccgtaaatggcggctctgtcccatgattctgcgtcacgtaaaactgcatctcggacaaattttttttcagttcttctgcgctaggtttattagccatttgctcacatctcactttaatcgtgctcacattacgtgactgattctaacaaaacattaacaccaactggcaaaattttgtcctaaacttgatctcgacgaaatggctgcacctaaatcgtgatgaaaatcacatttttatcgtaattgccctttaaaattcggggcgccgaccccatgtggtctcaagcccaaaggaagagtgaggcgagtcagtcgcgtaatgcttaggcacaggattgatttgtcgcaatgattgacacgattccgcttgacgctgcgtaaggtttttgtaattttacaggcaaccttttattcactaacaaatagctggtggaatatatgactatcaaagtaggtatcaacggttttggccgtatcggtcgcattgttttccgtgctgctcagaaacgttctgacatcgagatcgttgcaatcaacgacctgttagacgctgattacatggcatacatgctgaaatatgactccactcacggccgtttcgacggtaccgttgaagtgaaagacggtcatctgatcgttaacggtaaaaaaatccgtgttaccgctgaacgtgatccggctaacctgaaatgggacgaagttggtgttgacgttgtcgctgaagcaactggtctgttcctgactgacgaaactgctcgtaaacacatcaccgctggtgcgaagaaagtggttatgactggtccgtctaaagacaacactccgatgttcgttaaaggcgctaacttcgacaaatatgctggccaggacatcgtttccaacgcttcctgcaccaccaactgcctggctccgctggctaaagttatcaacgataacttcggcatcatcgaaggtctgatgaccaccgttcacgctactaccgctactcagaaaaccgttgatggcccgtctcacaaagactggcgcggcggccgcggcgcttcccagaacatcatcccgtcctctaccggtgctgctaaagctgtaggtaaagtactgccagaactgaatggcaaactgactggtatggcgttccgcgttccgaccccgaacgtatctgtagttgacctgaccgttcgtctggaaaaagctgcaacttacgagcagatcaaagctgccgttaaagctgctgctgaaggcgaaatgaaaggcgttctgggctacaccgaagatgacgtagtatctaccgatttcaacggcgaagtttgcacttccgtgttcgatgctaaagctggtatcgctctgaacgacaacttcgtgaaactggtatcctggtacgacaacgaaaccggttactccaacaaagttctggacctgatcgctcacatctccaaataagttgagatgacactgtgatctaaaaagagcgacttcggtcgctcttttttttacctgataaaatgaagttaaaggactgcgtcatgattaagaaaatttttgcccttccggtcatcgaacaaatctcccctgtcctctcccgtcgtaaactggatgaactggacctcattgtggtcgatcatccccaggtaaaagcctcttttgcattacagggcgcacaccttctcagctggaaacctgcgggtgaagaagaagttctgtggttgagcaacaacacaccgttcaaaaatggcgtcgctattcgcggtggcgtaccggtttgctggccgtggtttggtccggcggcacaacaaggtctgcctgcgcacggttttgcccgcaacctgccgtggacgctgaaaagtcatcatgaagatgctgatggcgtagcgctgacttttgaattgacgcaaagcgaagagacgaaaaaattctggccgcacgactttacgctgttagcgcatttccgcgtgggtaaaacttgtgaaatcgatcttgaaagtcatggcgaatttgaaaccacctctgccctgcatacctactttaacgtgggtgatatcgctaaggtaagcgtcagtgggctgggcgatcgcttcattgataaagtgaatgacgcgaaagaaaatgtactgaccgatggtattcagaccttccctgaccgtaccgatcgcgtgtatctgaatccacaagattgcagcgtgattaatgatgaagcgctgaatcgtattatcgccgtaggccaccagcatcatctgaacgttgtcggctggaacccgggaccggcgcttagtattagcatgggcgatatgccggatgatggctacaaaacatttgtttgtgtagaaacggcttacgctagtgaaacgcaaaaagtgaccaaagagaaacctgcacatctggcgcaatccattcgcgttgcgaaacgttaatttacgttaatgttgtgtgccgggtgcaatgcatccggcacacaacatcacaccatatccagcgcagtttttccttttggtgccggatatgccttatccagcatagctaattccgcactagaaagttcgacctcaagcacagccgcattttgttggacatgggcaatcgtggccgcttttggaatcgccatcacaccctgatgactgatcacccacgccaacaatacttgtgccgcgctgatattgtgagcatgtgcaatttcgttgactaccgcgttttttaacagtccattgcgcaaccgcccggcctgggctaacggactgtaagccatcaccggcatctgctgttgctggcaccaggggagtagatcgtactcaattcctcgactaccgagatggtaaagcacctgattagtggcacactgatttccccccggcagctgccagagttcctgcatatcagcataatcaaggttagaaacgccccagcggcggatttttccctgggcgatcaatttttccatcgctgcgacagtctcttcaaaagcgaaactgccagaccagtgtaataagtaaagatcgagataatcagtattgagacggcgtaaactggcttcgcatgcatttatcgctttttgcccgccagcattccacggatagactttagagacgagaaagaccttctctcgcagaccggttaatgcttccccaaccaccttttcggcaccgccatcggcatacatttcggcggtatcaatgagggttaaaccgagttcaatgcccgcgcgtagtgcagcaacttctgttttgcgctgactggcatcttcgcccatataccatgttccctgccctacggctggcagactgacatcgccactaaattgaatcattttttgttgcattgtttcctcccaggtattgcaccaccgtaatgcaaaacagggcgtgacgccctgtttttatgcacaaaatgccctggaaagatgcattatcagaatttgtaggtgatcccggtagaaatcaggccagtccaggatttatccaccatcgggctgtcagtaacttcatcagacagacgggtgtagcgtgcggtaccgtaaacactccagtcgccgaggaagttgtagctggcgctcagctccaggtaagggctccagctgtcgttcgggttatagccacgcagaccgctgcgagcggactctttgcggcttacgccataatagtattcgttctggttttcgctgttccactgcacaccaatacccggagtcacggtcaggccaccgttggtgtaacgatacaaccaggccatatcccagacgatgccgttgctgttatccagggtatcgccagccagggtggtacgcaggtaaccgtactgggtaaagtgagcataagacagaccagccatcatggtgctcttacggtcatccaggtgacgcatttggtgatcgccactgtctttcgctttgaagtaaagcgggctccagtaagcggtaatactaagtttatccgttgcgtcattccacaggtagtaaccaccacctaagccacggaaccagaagttatcgccttcatagttgattaccggtactgggtaaacatcggtatcgtaatctttatatgggtgttcaacgacacctacgcctgcgcccagggaaaatttaccttcagcgtgcgctacgcctgcagacgttgcgataagcactccaagtgccagaagtttgagtttggtcacaattaatcattccttaaacaaatgtttagcgggcgacaaagtttacccgtcaatacatcgaaacccaacctttttacgttttcattttttaaagtaactgtttaattttcctgacgcggatgacaccgcgcttacagccaaatgaatttagcgttactggcgagcctggtctttacattaattatgcaaaatttatggatgagttgttgatatgccattgaaattaagaaagccgtgcaggcaagttttccatttgccatctacgcttaattttgaaggtgtatcaccgggcacgttgttctcatcgtcgataaaatggcatgagagttgctgtgttttagcaagagacgtcgttcagtttacctcttccgggagcctctactattcatatgaacggctcttaacctgtgctaaaaaacgaaaggacggcataccatgaatatattcgatcactatcgccagcgatatgaagctgccaaggacgaagagttcacactgcaggagtttcttaccacttgtcggcaagatcgcagtgcttatgccaacgcggctgagcggctattgatggctatcggtgagcctgtcatggtcgatacagcccaggaacccagactttctcgactcttttctaaccgggtcattgcacgttatccggcgtttgaagagttttacggcatggaagacgcgattgaacagattgtctcttatctgaaacacgcggctcaggggctggaagagaagaaacaaatcctgtatctgctggggcctgtgggtgggggtaaaagtagccttgctgagcgactgaaaagtttaatgcagctcgtaccgatttatgtattgagcgcgaacggtgagcgtagcccggtcaacgatcatccgttctgtcttttcaatccgcaggaagatgcgcagattctggaaaaagagtatggcattcctcgccgttatctcggcaccatcatgagcccgtgggcggcaaaacgcctgcatgaatttggtggcgatatcactaagttccgggtagtgaaggtctggccgagtattctgcaacaaattgctatcgccaaaacggaacccggcgatgagaacaaccaggacatctccgcgctggttgggaaagtcgatattcgtaaactcgaacactacgcgcagaatgacccggacgcctacggctattccggtgcgctgtgccgcgccaatcaggggatcatggaattcgttgagatgtttaaagcaccgattaaagtgctgcatcccttgttaaccgccactcaggaaggtaactacaacgggacggaaggtatctccgccctgccgttcaacgggattattctcgcacacagcaacgagtccgaatgggtcactttccgtaataacaaaaacaacgaagccttcctcgatcgtgtttacatcgtgaaggtgccgtattgcttgcgcatttccgaagagatcaaaatctacgagaaattgcttaatcacagtgaattgactcacgccccatgcgcccctggcacgctcgaaacactgagtcgtttttccattcttagccgcctgaaagagccagaaaactccagcatttatagtaagatgcgggtttatgatggcgaaagtctgaaagacaccgatcccaaagccaagagctatcaggaatatcgtgactacgccggtgtcgatgaagggatgaacggtctgagcacgcgttttgcgtttaagatcctctcccgcgtgttcaacttcgatcatgtagaagtggcagcaaacccggtccatctgttctacgtcctggaacagcagattgagcgcgagcagttcccacaagagcaggcagaacgctatctggagttcctgaaaggttatctgatcccgaaatatgccgagtttatcggcaaagagatccagacggcctaccttgaatcctattccgaatatgggcaaaacattttcgaccgttatgttacctacgcggatttctggattcaggatcaggagtatcgcgatccggataccgggcagctgtttgaccgcgagtctcttaacgccgagctggagaaaatcgagaaaccggcggggatcagtaatccaaaagatttccgcaacgagattgttaacttcgtactgcgcgccagagcgaataacagcggacgcaatccgaactggaccagctatgaaaaactgcgcacggtcatcgagaagaaaatgttctccaataccgaggagctgttgccggttatcagctttaacgccaaaacgagtaccgacgagcagaagaaacacgacgactttgtcgaccgtatgatggaaaaaggctacacccgtaaacaggtgcgtttactgtgcgaatggtatttgcgcgtacgtaaaagctcttaacaaccctggcccggtacacatgttaccgggcctacaacgacagcgaaccgtgggcctgagaagcggcaacacaggcgtagcatacagttggcaaatgtagtacggggggcatatgacctggtttattgaccggcgtctgaacggcaaaaacaaaagcatggtgaatcgccagcgttttttacgccgttataaagcgcaaattaaacagagcatctccgaggccattaataagcgtagcgtgactgacgtcgacagcggcgaatccgtatccattcccacggaagatattagcgaaccgatgtttcatcaggggcgtggcggtctgcgccaccgcgtgcatccgggcaatgaccatttcgtccagaacgaccgaattgaacgtccccagggtggcggcggaggttccggcagtggtcagggccaggccagccaggatggtaaaggtcaggatgaatttgtctttcagattagcaaagatgagtatcttgatctgctctttgaagatttggccttaccgaatctgaaacaaaaccaacaacgccagctgaccgaatataaaacgcatcgggcgggttataccgctaacggcgttccggccaatatcagcgttgtgcgtagtttgcagaacagtctggcgcgacgcacagccatgacggcaggcaagcggcgggaacttcatgcactggaagagaatttggccatcatcagcaacagtgaacctgcgcaactgctggaagaggaacgtctgcgcaaagaaattgcagaattacgtgccaaaattgaacgcgtcccttttattgacaccttcgatttacgttacaagaactacgagaagcggcccgatccctccagccaggcagtgatgttttgcctgatggacgtttccggtagtatggatcaatccactaaagatatggctaagcgtttttatattctgctgtatctgttcctcagcagaacgtataagaacgtggaagtcgtatacatccgccatcatacccaggcgaaagaagtcgatgaacatgagtttttctacagccaggaaacaggcggcaccattgtttccagcgccctgaaactgatggatgaggtagtgaaagagcgttataacccggcacagtggaatatttacgctgcacaagcaagcgacggcgataactgggccgatgactctccgctttgccatgaaatcctggcgaaaaaattattacctgttgttcgttattacagctatatcgaaattacccgtcgtgcacatcagacattgtggcgagaatatgagcatctgcaatctactttcgacaactttgcgatgcagcacatccgcgaccaggatgatatttatccggtgttccgtgaactgtttcataaacaaaatgcaacagctaaaggctaaaactatcagccaggtcattatcgcctggctgatttttagcttactgtaaattatctcatttattacatacattagcttacaatcgctttaaatatgacagcataacctttacataatttagttccagaaaacaatcattcggaaaaatgattcagagtacacgtatttccatggggttattctttaaatattttttaagcttaacgaaaattgatcctggtcaaaactatatatctctgccaagtataaaatccagcactcacattgctctcctttttatggtttctatgggtacacaaaaattaaaagctcaaagcttttttattttcagtttattgctgacgttaattttattttgcattactaccttatataacgaaaacacaaatgtaaaactcatcccacagatgaattacctgatggttgttgtggctttgtttttccttaacgccgtcatttttcttttcatgttaatgaaatatttcactaacaaacaaattttaccaacactcattttaagccttgcatttttaagtggccttatctatttagttgaaaccattgtaattatccataaaccaattaacggcagtacactgatccagacaaagagcaatgatgtttctattttctatattttccgccaactcagttttatttgtttaaccagcctggcgctcttttgttatggaaaagacaacatccttgacaacaataagaaaaaaacgggaatcctgttgctggcgctgatcccttttttagtttttccccttctggcacacaatctgagcagttataacgctgactattctttgtatgtcgtcgattactgtccggacaaccatactgcgacctggggaatcaactatacaaaaatattggtttgtctgtgggcatttttactgttctttattatcatgcgcacacgattagccagcgaactatggccgttaatagcattattatgtctggcaagcctatgctgcaacttacttctactgactctggatgagtataattatactatctggtatatcagtcgcgggattgaagtttccagtaaactgtttgttgtgtcttttctgatttataacattttcaggagctgcaactctccagcaaactggcagttcatgatgtgctgaccaatatttataatcggcgctactttttcaacagcgtagagagtttattgagccgacctgttgttaaggacttctgtgtcatgctggttgatattaatcagttcaaacgcatcaatgcccaatggggacatcgtgtgggtgataaagtgctggttagtattgtcgatattatccagcaaagcatccgccccgatgatattttagcgcgactggagggtgaggtgtttggcttgctatttaccgaactcaatagtgcccaggcaaaaatcattgcggaacgtatgcgtaaaaatgtcgaactcctgaccggctttagtaacagatatgatgttcctgaacaaatgaccatcagtattggcacggtttttagtacgggtgacacgcgtaatatcagccttgtcatgacggaagcagataaagccttacgcgaagcgaaaagcgaggggggcaacaaagtgattattcatcatatttaagtgcaaaaatattcagagccatgctttttgcgtggcttttgcatacaatttattactattacccctaaatttcccctccccagcggcgcagagatgagtataattagcgcccctgtgccaggccgcaatcgaactttatctggttttctcgtttcactaaccgaaggagatgcgtataaagcttccgatgagcgtttatatgtcaataagcagaacaaaaacagccgttcatgataaccttctgtggttgtttgcttgtaatctcaggagcgtgaaatgactgaaatggctaaaggaagcgtgacgcatcagcggttaatcgctttattaagtcaagaaggtgctgacttccgcgtcgttacccatgaagcggtaggtaaatgtgaagcggtgagtgaaattcgtggcaccgctctaggccagggtgctaaggcactggtatgtaaagtcaaaggcaatggcgtaaatcaacatgttctggcgatcctcgcagccgatcaacaggccgatctgagccaactcgccagccatataggcggattacgcgctagcttggccagcccggcggaagtcgatgaactcacaggctgtgtcttcggcgcgatcccccctttcagcttccatccaaaactcaaactggttgccgaccctctactcttcgaacgatttgatgaaatcgccttcaatgcaggcatgctggataaatccgttattttgaaaaccgcggattatttgcgcattgcgcaaccagaactggtcaatttccgccgcactgcgtaattagccggtccgttcgataagaagaacggacaaaaccagtacaacagcaatggcaaaaaagctactcgtgataatcagtgtctcgacaaacatttgatcgttcatagcatgcccccgggagatagctgttttcacgttattgttagcgtgcacaaatggcagtttgatgacagttcgcctgattttttatgcaaaaaacgtaaagattttctacttccttcctgcagcaagcgtaaagtaagcaggcttattattttttggcaaggaaaccacgatgtttgatgtcactttgctgatcctgctcgggttagctgcgctgggctttatcagtcataacaccactgtcgccgttagtattctggtgttaatcattgtccgcgtcacaccgttaagcaccttttttccgtggattgaaaaacaggggctaagtatcgggataatcattctgacgattggcgttatggcccccatcgccagcgggacgctaccgcccagtaccttgattcacagctttctgaactggaaaagtctggtggcgattgcagtaggcgtgattgtctcctggctgggtgggcgcggcgtgacgttaatgggcagccagccgcaactggtcgccgggctgctggtaggcactgttttaggcgtagcgctgtttcgcggcgtaccggttgggccgcttattgccgcgggtctggttagcctgattgtggggaaacagtaattattgccgcgggtctggtttcgcactttgtggggaaacagtagttaatctcgcaatatatcggcctggcgtttgccccaggcctttcttaaacatagtaataaaggccgttgtactatcataccccagcgtatgagcaactttctgtacagtatcgcctttcactaatccctgaagcgccataatcagctgtaactgctgacgccactggcgaaaactcaaccccgtctcttttactatcagtcgggcaagattgcgttcactcatcgcaaaaaagccagcccattgccccaatgccccccactcgacaggccctttcgccatcatctccaccatcgtgcggattttaggatgagaagaaacgggcaggtgcagctgttgttgtggctgctgagggagttcatcaaacaggacctgaattaatctgcgggtcattggctcagcacgctgagtcgtcgtcctgtttgccagggttaaaattaattcccggcataaggggcttattttcaatgtgcaacatgttgtcggcattgtcactgcgctgggttcgataaacagaaaacagagttcagcattagctgttacttgattgctatgttccaccccgcccggtatccaaaccgcatattgtggcggcaccatccacaaagcattttccaccgtacaggtaattgcaccatgtagcgccagtatcagctgtcctttgcggtgctgatgtacaggactggttaactcatccgttccggcgtgaatacaaaatgcgaccgcggcttcatggtgtcggtcgggttcatagccattgagattcaacctgtgcatcattttgtccgaacttagcgataatttgtcattttagcttgattcaacataacaataaaaacggtaaggtacagcctcgtttgtaacaatgagaagcatatgacctgtagtactagtttaagcggcaaaaacaggattgtccttatcgctggcattctgatgattgccacaacattacgcgtcacctttaccggcgcagcaccgttactggatacgattcgttccgcttacagcctgacgacagcgcaaaccggcttattgaccaccctgccattattggcctttgcgctaatcagtcctttggctgccccggtagcgcgacgttttggtatggaacgtagcctgtttgccgcgttacttttgatctgtgctggtatcgcaattcgctctctccctagcccttacttattatttggcggtacagcggtcattggcggtgggattgcattaggcaatgtcttactgccaggattaattaaacgcgatttccctcattccgtcgccagacttaccggcgcatattccctgacaatgggagctgcagcggcactgggaagcgctatggtcgtgccgctggctttgaacggttttggctggcaaggcgcgttgctcatgctgatgtgttttcctctgctggctctttttttatggctgccacagtggcgaagtcaacaacatgcaaatttgagtaccagccgcgccttacatactcggggtatctggcgtagtccgcttgcctggcaggtcacattgtttcttgggatcaacagtctggtctattacgtgattattggctggcttccggcgatcctcatcagtcacggctatagcgaagcacaggcgggtagtctgcatggtttgctgcaactagccacagcagcacccggtttgctgatcccacttttcttacatcatgtgaaagatcagcgtggtattgcagcgttcgttgccttgatgtgcgcagtgggcgcggttgggctctgctttatgccagcgcacgcgatcacctggactctgcttttcggttttggttccggcgcaacaatgatactggggttgacgttcattggtctgcgggctagttctgcgcatcaggcggcggcactcagcgggatggcacaatccgtcgggtatttgttggcagcctgtgggccgccgctgatgggtaaaatacacgatgctaacggtaactggtctgtaccacttatgggtgttgccatacttagtctactgatggcgattttcggactttgcgccgggagagacaaagaaattcgctaatatccggtgctatagtgacgtaacaaatcatgcgtgaaagggagaacaaacacgatgaatattcagtgcaaacgcgtttatgatccggctgaacagagcgatggttatcgcatactggtcgaccgcctctggccgcgcggtatcaaaaaaaccgatttagcccttgatgagtgggataaagaaatcacgccgagtacggaactgcgcaaagcctttcacggcgaagtcgtcgattatgcaacctttcgcgagcaatatcttgcagaactggcgcaacacgagcaagaaggaaagcggctggcggacatcgccaaaaaacagccgctgaccctgctctacagtgcaaaaaacaccacgcagaaccatgcgctggtgctggccgactggctacgtagcttgtgattttagtacagcatccggcggttatttttcaccagccggatggtcacgccgccacaatgcccattcatcaatcgtttcaccgcccggtaatttgcaattgttgctgaccccttgcgctgtctgcactggaatgagcgtcccgcccttctgctggcaatagacgctcgccggatttgccataccaatctgcggcggtttaggtgcttctggctgagaaggggtactacaaccagccaggaccagcaagcaaggcagaacaaaactgataattttcatttattgatctcacatatttatccaagattagagtatcgcggtatcgttttgttttgcagcactatttttattacattcactcaaaacatattacgtcttgtttcatctttgttgatgatgttttatcatgcctgcaaagattaaataatcagcatttacccgccgtatcctggagttgttccgtgagtgatcagattatcgcccgcgtcagccaatcccttgccaaagaacagagtctggaaagtctggtccgacagcttctggagatgctggaaatggtcactgatatggaaagtacctacctgaccaaagtggatgtcgaagcgcgcctgcagcatattatgtttgcccgtaacagccagaaaatgtacatcccggagaattttaccgtcagctgggattacagcttatgcaaacgcgccattgatgaaaactgctttttcagcgatgaagtccccgaccgttggggtgactgtattgcggcacgcaatcttggcatcaccacatttctgagcacgccaattcacttaccggatggaagtttctatggcacgctttgcgccgccagcagtgagaagcgccagtggagtgaacgcgcggaacaggttttacagttattcgccggactgattgcacaatatattcaaaaagaggcactggttgaacagctgcgcgaagccaatgctgcgctgattgcgcaaagctataccgacagcttaaccgggctaccgaatcggcgggcgatttttgaaaatctgacgacactgttttccctcgcccggcatcttaaccataagataatgatcgcgtttatcgatctggataacttcaaattaatcaatgatcgttttggtcataatagtggcgatctgtttctcattcaggttggcgagcgccttaatacgctccagcaaaatggcgaagttattggtcgtctcggcggtgatgagtttttagttgttagtctaaacaacgagaatgcggatattagcagcctgcgagaacgcattcagcagcaaatacgtggagaatatcacttaggtgatgttgatttgtattatcccggtgccagtcttggcatagtagaagtcgatcctgaaacaaccgatgcagacagtgccctgcatgctgccgatattgcgatgtatcaggagaaaaaacacaaacagaaaacaccttttgtcgcgcatccagcgctacattcctgaggcgtattcacatccttttgattggtgataacatgcgaatcggtattatttttccggttgtaatcttcattacagcggtcgtatttttagcatggttttttattggcggctatgctgccccgggagcataaagatgaaaaaaacaacgattattatgatgggtgtggcgattattgtcgtactcggcactgagctgggatggtggtaacgtcacctctaaaaaatagcaaaggctgcctgtgtgcagcctttgtgcaatttaagcgttaacttttaatcttcctgtagataaatagcacgacaatcgcaccaataacggcaaccacgaagctgccaaaattgaagccatcgactttaccaaagccaaacagcgtgctgatccatccgccgactacggcaccgactatccccagcaggatagtcataaagaatccacctccatctttacctggcatgatccacttcgccagaataccggcaataagcccaaaaataatccaactcagaatgcccattgtttcctcacttatctgttttgcattagcgggttagtcgctgataaaaagcatagcacaacatcgggagggcaagatttgtgacgagcatcacggaggttttttttgcgatggcgcagaaattgcgccatcaacgatcagtgataattaccaaccacaaacatcatgttcgttttccgtgtcataagaacgtacggtattcaccagatcttttatcacttcagccgccacttctggcaccagcaaagtcatcggcgtctctgtttcataatcgacagaaacgccattgctgttattggtgacggtcacggtatacgttgctttgcccatgattcatttcccgttatgaatgactttccgttgttgcgcaccttccatcaggacttcaggagccacgaagaagtcaatgttgaaataagtatcgtcagtcatggcttcaatgttgtgccacttttctggagggaacaccgcaaactgccccgcttcgataaggatcacctgatcaggctctgcactgtgttcatcagcgtagccgagatatttgaccgccccatgcataacggaaaggcgtgggtaaacccccgggcgcgttcctttatcaagatgacgttcgaatattccggcaggtgcagtttgtttattccagaaaggcgtactgcgcgtatgaatataattctgtgggatttgaagcatccttttccctccttcggtgaatgcgctgaaaacggtttattccagccgtttcagggtacgcctgataatttgcattttaaataccatttattggttactttttagcaccatatcagcgaagaatcagggaggattatagatgggaagcccgcgacaacgcgggctgaaagcatcaggattgcagcgtcgccagtcgggcagcgaaacccacgaacatcaaaccaatcagactgttgccaactttagccagtttctttttggtacgtatgtactgcgtgacaaaagcaccagatataatcaggaagctcaaatagcagaaactcaccagttccagcgtcgccgccagaataaagaaactaattcccgtatgtggggcattaacatcgataaactgtacgaaaaagctcacatagaacaaaatggctttcggattagtcaggctcaaaattaacgcgcgtttaaaaatagcaccgtattggggctcatcggatttggcctcgctatttttacccttcagggtcgcgtaaagaattttactccccagatagagcaaataaaacgcaccaagataacgtacaatgttgaataatatcggggtggtcttaattaatgtcgccactccagcccatgccagaaacatcaataccgcatcgccaataaatacaccgcaggccgcaagataaccgcctttcataccgctactgacgctatttttgagtacaaacagggtatttggccctggcaccaacacaataaaaatggccccaaccagataggtccagtaattcagaaccccgtattcagcgaacacattaacctctttaattatctttcgatcatgcgcgattaaaggtgaatatgctaaccaatctgtagcggcttagaaaggagaaaatcaggttttaacctgatatcaacccgataattgaatcattaatcaggcatgctccagactaaaattcgggtagtgctcggcaaaatactggcgtaaaaattctaccgttatccgcactttcgcactcgtcgccagcctactaacataaacggcccagacgttcgctggctggtaatattccggtagcacttgcactaaatgaccactggcaatgttttcgctaacatcccaccaggaacgcagagcaatcccctgcccatcgagacaccactgatggacaatttctccatgattagagctcagtgggccggtgactttaatcgcatgggggccttctttattgcgtaattgccagacaccaaaaggatgatcgcgctctttaatgaccaggcacggcaatgcagaaagatcggttaaatgtttcggcgcgccatgttgcgcaataaattccgggctcgcgcagagaatacggtaattggtcgccagtttgcgggcgattaaattaggggcgatgtcatcgccaatgcgaatatcgagatcgacaccttcattgaccaaatcgaccagtcggtcttccacatcaaaacgtaattccagttgcggatacgccttcgccagcgctaataacgccggagccaccacctgtcgtccaaaaccaaagctgctgataatacgcagcatcccctgcggcacctgacgcacgtcagaaagttcgtccatcatctgaccgacatcctgcaaaatccgctgcgcccattcataaatccgctctccttcttcggtaatggtgacgcggcgggtggtgcggtgtaacaacaccacgtttagcgtttgctccagcaaggcgatgcgcttgctgacgaacgccggactaacgcccagttcttccgccacggcggcaaaaccagcccggcgagccaccagcataaagacgcgcaaatcattcagcagcggtaaattattcatgattcgtgttttatgtttcaccagttacggggattaattccttttcagtcaattataggatggtgatgttgtcaattttgatggtcaggaagtgagaacccaatgatgaaaacgatgcgtattgctgcgatcccgggagacgggattggcaaagaagtccttcctgaagggattcgcgtgttacaggctgccgctgagcgctggggcttcgccttgagttttgagcaaatggagtgggcgagctgcgagtattacagccatcacggtaaaatgatgccggacgactggcatgagcaacttagccgtttcgacgccatctattttggtgccgtcggctggccggataccgttccggaccatattagcttgtggggtagcctgctgaaatttcgtcgtgaattcgaccagtacgtcaacctgcgcccggttcgtctctttcctggcgttccctgcccgctggcgggaaaacagcctggcgacatcgatttttacgtggtcagggaaaacaccgaaggcgaatattccagcctcggcggtagagtgaatgaaggtacagagcatgaagtcgtcattcaggaaagcgtatttacccgccgtggtgtcgatcgcattttgcgttatgccttcgaacttgcgcaaagccgtccacgtaagacactaacttctgccactaaaagcaacggtttagccatcagcatgccgtactgggatgagcgagtggaagcaatggccgagaattacccggagatccgctgggacaagcagcatattgatattctctgcgcgcgttttgtgatgcagccggaacgattcgatgtggtggtggcgtccaatttgtttggcgatatcctttccgatcttggcccggcctgcaccggcaccattggcattgccccatccgccaacctgaatccggaacgcactttcccgagcctcttcgagcctgtccacggttccgcgccggatatctacgggaaaaatattgctaaccctatcgccacgatttgggccggggcaatgatgctcgattttctcggcaatggcgatgagcgtttccagcaagcgcataacggtattctggcagcaattgaagaagtgattgctcacgggccgaaaacacctgatatgaaaggcaatgccaccacgccacaggttgccgacgcgatttgcaaaattattttgcgttaaggtcaaaccagtttatttgaaccgcgtcactgacgcggtttttttattcgttctttgcagtaaataacctgcgtcatttcaccttttattgtttccgtttcgtgttttatggctttccgtattcttaattgtttaatttatgtaacatgcaaattttgttacgcgtacgttaggttccgccgtacaggtattggttttgctggcaatgggactggtgatttatttagccaccagtaaatacggcaatattcgtcttggcgaaggaaaaccggaatacagcacgctctcctggctgtttatgtttatttgtgccggtttaggttcttctacgctttattggggggttgctgaatgggcctattattatcaaacacctggattaaatatcgcaccgcgtagtcaacaggcactcgaatttagcgttccctactctttcttccactggggcatcagcgcctgggcaacttatacgctggccagtttaatcatggcttatcactttcatgtgcggaaaaacaaaggtctgagcctttccggcattattgctgctattaccggcgttcgcccgcaaggcccatggggaaaactggtcgatttgatgttcctgatcgccactgtcggcgcactgaccatttcccttgttgttaccgcagcaacctttacccgtgggctttccgcgctgaccggtttacccgataacttcaccgtgcaggcatttgtgatcctgctttccggcggcattttttgcctaagcagctggattggtatcaacaacggtttgcaacgtctgagcaaaatggttggctggggcgcgttcctgctgccattactggtgctgattgtcggcccaaccgaatttattaccaacagcatcatcaatgccatcggcctgaccacgcaaaacttcctgcaaatgagcttattcaccgatccgcttggcgatggtagttttacccgcaactggaccgttttctactggctgtggtggatcagttacacccctggcgtagcaatgtttgtcacccgcgtttcccgcggtcgtaagattaaagaagttatctggggactgatcctcggcagcaccgtcggttgctggttcttctttggcgtaatggaaagctatgccattcatcagtttatcaatggcgtaatcaacgtcccacaggtgctggaaacactgggcggcgaaacagctgtacagcaagttctgatgagcttgccagccggtaaattgttcctcgccgcatacctgggcgtgatgattattttccttgccagccatatggatgcagtggcctacaccatggcggcgaccagtacgcgtaatctccaggaaggtgacgatcctgaccgtgggctgcgtcttttctggtgcgtggtgatcactctgatcccgctttccatcttgtttaccggtgctagcctggaaacgatgaaaaccaccgtcgtgctcacagcccttcccttcctcgtcattttactggtgaaagtcggcgggtttattcgctggctgaaacaggattacgccgacattccggctcatcaagttgaacattatctcccgcagacaccggttgaagccctggaaaaaacgccagtgctccctgcgggaaccgtattcaaaggcgacaactgagcgccatcatcctaacgataaaggtatccctatgagcaatctgagccctgactttgtactacccgaaaatttttgcgctaacccgcaagaggcgtggaccattcctgcccgtttttataccgatcagaacgcgtttgaacacgaaaaagagaacgtcttcgccaaaagctggatttgcgtcgctcacagcagcgaactggcgaatgccaatgattatgtgacgcgtgagatcattggcgaaagcatcgtgctggtacgcggtcgtgataaggttttgcgcgcgttctataacgtgtgtccgcaccgtggtcatcagttgttgagcggtgaaggaaaagcaaaaaatgtgattacctgcccgtatcacgcatgggcattcaaactcgatggcaacctggcccatgcacgtaactgcgaaaacgtcgccaatttcgatagcgacaaagcgcaactggttccggtgcgtctggaagaatatgccggattcgtcttcatcaacatggaccccaacgccaccagcgtagaagatcaattacccggcctgggcgcgaaagtgctggaagcctgcccggaagtccacgatctgaaactggcggcccgctttaccacccgcacgcctgccaactggaagaacattgtcgataactatctcgagtgctatcactgtggtccggcgcatccaggtttctccgactccgtacaggttgatcgttactggcacaccatgcacggtaactggacgctgcaatacggtttcgccaaaccgtccgaacagagctttaaatttgaagagggtacggatgcggcattccacggtttctggctgtggccgtgcacgatgctgaacgtcaccccgatcaaagggatgatgacggtcatttatgaattcccggtggattctgaaactaccctgcaaaactacgatatttacttcaccaatgaagagttaaccgacgagcaaaaaagcctgattgagtggtatcgcgatgtgttccgtccggaagatttacgtctggttgaaagcgtacagaaagggctgaaaagccgtggctatcgtggtcaggggcgcatcatggccgacagtagcggtagtggcatttccgaacatggtatcgcccatttccataatctgctggcgcaggtgtttaaggactaatgacatcggcggcggtattttccgccgctgggctgatttttgatggagtacagcaatgagtgactatcaaatgtttgaagtacaggtgagccaggttgaaccccttaccgaacaggtgaaacgcttcacgctggtggcaaccgatggcaaaccattacctgcgtttaccggaggaagtcacgtcattgtgcagatgagcgatggtgataaccagtacagcaatgcgtatagtctactgagtagcccgcatgacacctcttgttatcagattgccgttcggctggaggaaaacagccgcggcggttcccgctttttgcatcagcaggtaaaagtgggcgatcggttaacgattagtacgcctaataacctgtttgcgctaattcccagtgccagaaagcatctgtttatcgcgggcggtattggtatcacccctttcctgagccacatggcagagctgcaacacagcgacgtcgactggcagctacattactgcagccgaaatccagaaagttgcgcatttcgtgatgagctagtccagcatccgcaggctgagaaagtccatttgcatcatagtagtaccggaacacgactggaattagcgcgattattggcggatatcgaacctggcacacacgtttatacctgtggccccgaggcgctaattgaagcggtaagaagtgaagctgcgcgtctggacatcgccgccgatacgctgcactttgagcaatttgctatcgaagacaaaaccggcgatgcatttaccctggtgcttgcccgttccggaaaagagtttgtggtgccggaagagatgactattttgcaggttattgaaaataataaagccgcgaaagtggaatgtttatgtcgtgaaggggtatgcggaacctgcgaaacagcaatactggaaggtgaagctgaccatcgggatcaatattttagcgatgaagagcgtgccagccagcaaagtatgttgatctgttgtagccgtgcgaagggtaaacgcctggtgttggatttgtaatttgccgaagccggatgtggcgctgagcgcgcccagtccggcttcggaagattttactgcggatattcctgcaataaattgtgtaatgcttccgccatcagctcaccacgccagccggaaatcagctccggcaaattgttctgcggtttcagtttccagtgccagttcagcagttggttgatttgccgacggcttgccagcaattcggcgctgatcttatgcgtttcgctcacgtcagtaatcaggctcttaatcgctttaaacgctttacgataacccggcatgtccatcaggttaagcatcggctgcggtaaggcatcttccggcaatgtctgcgctttttccaccagcgctagcagcgttttaccgtgaaagcggatttcgctaccggataaacccaggctgtccagttcgcctaaacttcccggcatataacgcgctacgctccacaaatgctcttcacgcacgacaaagttcaccgccagatcgcgctctcgcgccttgcgcagtcgccagtcggctaacagttgcagacaggccagttggcgtgtgcgtaattgccaggcattggtgatatcacgccaggcatcttccggcgcaacgacttcctgacgacgcatttgcatcaggcggcattcatccagcgccgcaggtagccagccggaggcctccgtttctaccataagcttggcggtgatcggtaacagataccagacatccgccgctgcgtattcacactgacgttcggtcagcggtctggccagccagtcggtgcggctttcactcttgtccagcgtaacgccggaatactcttccaccatggaagcgaaaccccaactcatcgggcgtccgcagaaggcagcaaggatttgcgtgtcaatcaagggttgtggtaattcgccaaagacattgaggaacacttccagatcttcactgcctgcatggagaaattttgtgatggacggatcgcgcaggatcgctttcagcggactccagtcggtgatcccgagtggatcgattagcgccagatgctcgccatcgaaaagttgaatcaaccccagctgcgggtaataagtgcgcgtacgaacaaattcagtatccagggctatcgccggaaaggcacggacggcttcacacaaagaagccagcgcatcgtccgtggtaatcatttggtaattcaaattgttttctctttagtgggcgtcaaaaaaaacgccggattaaccggcgtctgacgactgacttaacgctcaggctttattgtccactttgccgcgcgcttcgtcacgtaattctcgtcgcaaaatttttccgacgttagatttcggtaactcatcacgaaactccaccagcttcggtactttgtatcccgtgagctgacggcggcaaaaagtcaccagactctcttcggtaaggcttggatcttttttcactacgaagattttcaccgcttcaccactggagccggaaggtacgccaacagccgcgacttcctgtacgccaggatgctgcatgacgacatcttcaatctcgttgggatagacgttaaaaccggaaaccagaatcatgtcttttttacgatcgacaatgcgcaggaatccttcttcatccattaccgcgatgtcgccggtgtgtaaccagccatttttgatgatttcatcggtagcatcgggacgctgccagtaacccagcatcacctgcggtcctttgacacaaagctcacccggttgacctggtggtacttcattatcatcatcatccaccagtttggcttccgtgctcggcaccggcaaaccgatgctaccactatgataatcaatatcatatgggttaacgctgaccagcggcgcacactcggtaaggccatagccttccagcagatactgtccggtcagtttcacccaacgctctgccaccacttgctgcactggcatcccaccgcctgcggaaagatgcagactggagaaatccagctgctggaactctttattgttcagcaacgcattgaacaaggtgttaacgcccgtgatagcggtaaacggatatttcgctaactcttttaccaaccctggaatatcgcgcgggttagtgataagcaggttctgcccacccagttcgataaacagcaggcagttaatggtcagggcaaaaatgtgatacagcggcagcgccgtcaccaccagctctttgcccggatgcaacagcggaccataggtcgcgttaacctgttccaggttcgccagcatattgcggtgagtcagcatcgcgcctttcgccacaccagtggtgccgccggtgtattgcagaaaagctaaatcttccggcaccagttcgggtttgacgtactgcatccggtagccgttatgcagtgcgctacgaaaactaatggcatctggcagatggtatttcggcaccaaacgcttgatgtatttaacaacgaaattgactaccgtgccttttgccgtagatagctgatcgcccatacgggtcagaattacgtgctgaacggcggttttatcaaccactttttccagtgtgtgagcaaagttagacacgataacaatcgcgcttgcgccgctatcgttaagctgatgctcaagctcacgcggggtatacaacgggttaacgtttacgacgatcatcccggcacgcaaaatgccaaacagcgccaccggatattgcaataaattaggcatcatcaacgcaacgcgatcgcctttcttcagccccaacccttgttgcaaataagcggcaaacgcgcgactgcgttcttccagcttgcggaaggtcattacctcccccatattcacaaacgcaggttgatcggcgtagcgcgcgacgctctgctcaaacatatctaccagagattgataacggtcagggttgatctccgtcggaacgtccgcgggataacggttaagccaaaccttcttcaattcttcacctctaaaatgcgtgttcgtcgtcatcgcaaccccaaatgatatacatgccgttaacataatattaactcatcataccagcttgataattacccaacgaaaaggttgcgaagcgcgtcactatttatttttatctttaccgtaagaatgcagaaacagcggaccagccgctgtttctttttctttaaaaacaagcaattattcagttacaactgtttgtactctcgcggggccgggattataccagccccatccgccgtagccatagggccagccacgaccgccataaaaccatggatcaatcggctgaggcggcataatcacctgctgggttaaatgccaacgtttgtaacccgttacttgcatcaccataaatttatagggcgtattgccgattttgccgtcaaccgcaccagtgattggcccgactaccgtaaccagttgtccacggaaatccaccgggtccagaaaaccgttcacatcggcataaatgcgaccgcgagaaggttctcccagcgtcggtctggctccgctgtccagcggtacggtagcaatttccaggcgagttttcccttgctggttttgtaccgcaaccactttgccaccaaagcgtgcctcctgaccaacgtacagctgcggcgcactcatcacccgaactaaatcttgttgcggcgtgggactgctgcctttaatggcgtccggcacagtgacacaaccgctcagcattagcgcaaacgtacctgccagtatgcctttgataacattcttttgaaccgccatggtgcgactcctttttttctcagggcatactcttaagattcattctttgcccggaagtttcttccatgcgacgttgttacgtaaataaaccggttcggcatgttccaccgccaccgttttaccctcagcaaacatctgacacgcaatcggcagcatatcttcagcagcaggcagtaacacttcgccatcgcgcaaaaccagcccgctctctttaccgagatccggccaagcttgccagcccgtccctaccgtcacccattcgccggaaagctgttgcattcgttcatggacgatttcgggtttgagtacggcttcggtttcttcaccgtgccagataccgttttcatcacgctgatattcggcccagtaaacttcgcccattcgcgcgtcaatggctgccagcacgcgggttgcgccgtttttgcgccacgccccttgcgccatcgtcattagcgtggagacgccaatcatcggtaattccgcgccaagcgccagcccttgcgcgatgccaataccaatgcgcacgccagtaaagctaccggggccgcgcccgtaagccagagcgttaatatcagtcagggaagttccgctggtggtcaggatatcctgcaccatcggtaagattcgttgagtatgttcacgagggcaaagctcaaaatgagcgttgacagtaccgtcgttccacagggcgacagagcaggcctctgtcgcggtatcgatagccagaattcgcatgggtcttcgtgcttagatcaataaaaaggcgcgcatcataccatactccgtaacaaattacctggaggatggtatcgcaaggaaacgaaccgcacgggcaatgtcacgggtgcgtggcgcgggcggcagactggcgagaaacgtcgcgccgtaaggacgcatcaccagccgattgtcacaaatcaccagcacgccacgatcgtcggcgtcgcgaatcagtcgccctaccccctgtttgagagtaatgacggcatctggtagttgcacttcatcgaacgggtcgccaccgcgcaaacgacaatcttccatgcgcgcttttaacagtggatcatccgggctggtaaacggcaatttgtcgataattaccaaactcaatgtatcgccacgcacgtccaccccttcccagaaactgctggttgccacaagaagcgcattaccggcgctgacaaattgctgcaacagttgccctttgctggtttccccctgcaacaatacaggaagcgtcatggtagcgcggaactgctcggccagatcgcgcatcatggcgtggctggtacaaagcataaaacaacgaccgttgttagcttcgatgatcggtcgcagcattgccgctaactggcgagcagaacctggctggttggtttgcggcagattgcgcagcacacagagtaacgcctggcggctgtaatcaaatgggctgggcaacagcaagctctcggcctgttcgatgccaagccggctggtgaaatgatgcagatcgtcgttcacgctcagcgttgcactggtgaagatccagctaccgggtttttgcgccattaactctttgaatttatccgccacgctgagcggcgtgagagccagagtaaaatggcggctagtgcattcgtaccagtagctgtagcccggctgattgatctcttttagccgcttcagccgtgtgcgatacaacgtggcgcgctcaaatgccgcatccagcaaggcggaacgccccagactcagtttcgccacgtcataacaaagttccagggtgtcatcgagcagtaaaaatgcccgctgaatttgcggattagctaacagctcacgcaggttaccgcgataacctggctcaccgagttgcagacgaaaatcctgcgcactctgggcaagacgatcagcgcacttttgtaactgctgggtgtcttttaattcggtgcggtaggcgatggtgatgtcttttgccaggtcgagcagttgtcgactggagagactctgaccaaaatactggctggcaatgtccggtagctggtgggcttcgtcgaagatcatgacgtccgcttccgggatcagttcgccaaatccactctctttaaccaccatatccgccagaaagagatgatggtttaccaccaccacatcggcgtccatcgcttttttacgtgctttgaccacaaagcaatctttatacatcgggcagtcgctgccaagacagttgtcgttggtgctggtgaccagcggccacgcctgactatcttccgccacgctgacgcaggtgctgatatcaccatcgactgtttgattagaccaggagcgcagcaggatcacatcgcttaagatttgtaccggcagatcgccccccgccagcgcctgctgttcgagacgttcgaggcagaggtagttactgcgccctttcagcagcgccacgttgcccgtatatttcaatgccttactgactgttggcaaatcgcggctgtagagctgatcctgcaacgctttactgccggtgctgataatgactttctttttcgcccgcagcgcaggagccaggtaagcgtaggttttgcccgtaccggttcctgcttccaccaccagcggctggcctttttctatcgcctgggtgacggctaccgccatctgtcgctgtggttctcgcggcttaaagcctggtatcgctttcgccagctgaccgtctggtgcaaaatcgtccgtcacactaccccctgttgatttgaacagggattatgtcaggatgagggcgctttcgccagttgaagtggtgacggcgacctcacattgtggcagtctttgcagcacgaaaatggaagtataatgaggacaaaatgatgactatcgttcgtatcgatgctgaagcccgctggtctgatgtagtaatccacaacaacacgctctactacactggtgtaccggaaaacctcgacgccgatgcctttgagcaaaccgccaacacgctggcacagattgacgccgtgctggaaaaacagggcagcaataaaagcagcattctggatgccaccattttcctggccgataaaaacgacttcgcggcgatgaataaagcgtgggatgcttgggttgtcgcgggtcatgcgccggtgcgctgcacggtacaagcgggtttgatgaacccgaagtataaagttgaaattaagattgtggctgcggtgtaagctttatcgaagcaaaataagtcagacgataatttatcgataatactggtcggttttacataaatcgaccagagaataagatattactgttgatgcttctgctaattcattatttatatttataatttcaattttatctataaaactaactatataaataaacataaacatgccgttgtgttcgccctttgattagcaactctggttttctttcttagctgaacaatctggttatagcgtgcggactgaccgttaaatttctccatcttactggataacacaccatgagctgctacctttaaaacacctgaatgtcaacaggttaactcgtgccatatcgttataatccctttgatattagatgcaaattaaggtcatatatagccttatcgataacatggttaattttaaggataagaatatgcctgctgtaatagataaagccctggatttcattggtgccatggatgtaagtgcgccaacaccaagtagcatgaatgaaagcacggcgaagggaatctttaaatatttaaaagaactgggagtacccgcgagtgccgctgatattacggcgcgagctgaccaggaaggctggaaccctgggttcacggaaaaaatggttggatgggcaaaaaaaatggagacaggtgaacgttctgtgattaaaaatcctgaatactttagtacatatatgcaggaagaactaaaagcactggtctgagttaaatttatatcagcataaatgggtcaggacgcttttaatcacatataaaaagcgtcctttttctcacaatcaaatgatcatcggcttctataacgaaatcgatacggattagtgtgttactcgtcttcatcctcaaaacgcgccacgattcgctcgccggagtggttggcacgcagctcttctgccaccagcgcgattgcctggccgctgctcatcccttgtgccatcagttcctggatccgctcgacagctttttgctgctgttcatgggtgagactaggtaaacctgcaaacattgttaactcctgctaaattgttggcgctaattatttcatgctacccggcacatagccagtagagtcaggactgatgaagacgttatctcccgctgtgattactttactctggcgtcaggacgccgctgaattttatttctcccgcttaagccacctgccgtgggcgatgcttttacactccggctatgccgatcatccgtatagccgctttgatattgtggtcgccgagccgatttgcactttaaccactttcggtaaagaaaccgttgttagtgaaagcgaaaaacgcacaacgaccactgatgacccgctacaggtgctccagcaggtgctggatcgcgcagacattcgcccaacgcataacgaagatttgccatttcagggcggcgcactggggttgtttggctacgatctgggccgccgttttgagagtctgccagaaattgcggaacaagatatcgttctgccggatatggcagtgggtatctacgattgggcgctcattgtcgaccaccagcgtcatacagtttctttgctgagtcataatgatgtcaatgcccgtcgggcctggctggaaagccagcaattcagcccgcaggaagatttcacgctcacttccgactggcaatccaatatgacccgcgagcagtacggcgaaaaatttcgccaggtacaggaatatctgcacagcggtgattgctatcaggtgaatctcgcccaacgttttcatgcgacctattctggcgatgaatggcaggcattccttcagcttaatcaggccaaccgcgcgccatttagcgcttttttacgtcttgaacagggtgcaattttaagccttagcccagagcggtttattctttgtgataatagtgaaatccagacccgcccgattaaaggcacgctaccacgcctgcccgatcctcaggaagatagcaaacaagcagtaaaactggcgaacagtgcgaaagatcgtgccgaaaatctgatgattgtcgatttaatgcgtaatgatatcggtcgtgttgccgtagcaggtagcgtaaaagtaccagagctgttcgtggtggaacccttccctgccgtgcatcatctggtcagcaccataacggcgcaactaccagaacagttacacgccagcgatctgctgcgcgcagcttttcctggtggcagtataaccggggctccgaaagtacgggctatggaaattatcgacgaactggaaccgcagcgacgcaatgcctggtgcggcagcattggctatttgagcttttgcggcaacatggataccagtattactatccgcacgctgactgccattaacggacaaattttctgctctgcgggcggtggaattgtcgccgatagccaggaagaagcggaatatcaggaaacttttgataaagttaatcgtatcctgaagcaactggagaagtaagacgtggaataccgtagcctgacgcttgatgattttttaagccgctttcaacttttgcgcccgcaaattaaccgggaaaccctaaatcatcgtcaggctgctgtgttaatccccatcgtccgtcgaccgcaaccggggttgttgctgactcagcgtagcattcatctgcgtaaacacgctggacaagtggcattccctggaggtgcagtcgatgacacggacgcaagtgctatcgccgccgcgctgcgcgaagctgaagaagaggtcgctataccgccttccgccgttgaagttatcggcgtgctgccgcccgtcgatagcgtcactggctaccaggtaaccccagtggtcggcattatcccgcccgatctgccgtatcgcgccagtgaagatgaagtcagcgcggtgtttgaaatgccgctcgcccaggcattacatctgggtcgttatcaccctttagatatctaccgccgtggtgatagtcatcgggtatggctgtcctggtacgaacagtattttgtatggggaatgaccgcaggcataattcgtgagctggcgctgcaaattggtgtgaaaccctgactatacttatctttacatctacaaaacactacttgagacaatcatcgcaatattagttaaatcgcggtttttgattagtttaattcatgtgaatagttaagccagtcgccgcgttccctcttacactatgcgctgttattagttcgttactggaagtccagtcaccttgtcaggagtattatcgtgattagtctattcgacatgtttaaggtggggattggtcccagttcttcccataccgtagggcctatgaaggcaggtaaacagttcgtcgatgatctggtcgaaaaaggcttactggatagcgttactcgcgttgccgtggacgtttatggtagtctgagcctgacgggtaaaggccaccacaccgatatcgccattattatgggtcttgcaggtaacgaacctgccaccgtggatatcgacagtattcccggttttattcgcgacgtagaagagcgcgaacgtctgctgctggcacagggacggcatgaagtggatttcccgcgcgacaacgggatgcgttttcataacggcaacctgccgctgcatgaaaacggtatgcaaatccacgcctataacggcgatgaagtcgtctacagcaaaacttattattccatcggcggcggttttatcgtcgatgaagaacactttggtcaggatgctgccaacgaagtaagcgtgccgtatccgttcaaatctgccaccgaactgctcgcgtactgtaatgaaaccggctatagcctgtctggtctcgctatgcagaacgaactggcgctgcacagcaagaaagagatcgacgagtatttcgcgcatgtctggcaaaccatgcaggcatgtatcgatcgcgggatgaacaccgaaggtgtactgccaggcccgctgcgcgtgccacgtcgtgcgtctgccctgcgccggatgctggtttccagcgataaactgtctaacgatccgatgaatgtcattgactgggtaaacatgtttgcgctggcagttaacgaagaaaacgccgccggtggtcgtgtggtaactgcgccaaccaacggtgcctgcggtatcgttccggcagtgctggcttactatgaccactttattgaaagcgtcagcccggacatctatacccgttactttatggcagcgggcgcgattggtgcattgtataaaatgaacgcctctatttccggtgcggaagttggttgccagggcgaagtgggtgttgcctgtagtatggctgctgcgggtcttgcagaactgctgggcggtagcccggaacaggtttgcgtggcggcggaaattggcatggaacacaaccttggtttaacctgcgacccggttgcagggcaggttcaggtgccgtgcattgagcgtaatgccattgcctctgtgaaggcgattaacgccgcgcggatggctctgcgccgcaccagtgcaccgcgcgtcagcctggataaggtcatcgaaacgatgtacgaaaccggtaaggatatgaacgccaaataccgcgaaaccagtcgcggtggtctggcaatcaaagtccagtgtgactaatacttcttactcgcccatctgcaacggatgggcgaatttatacccgctttctcgtctgctgtaatattccccactacacttccactgttgcgtcaggcgtttgtcgccatacgcttacagggtggcccgcatgcaaaaagcacaacggatcattaaaacctatcgtcgtaatcgaatgattgtttgtacgatttgcgcactcgttacgctcgctagcaccctgagcgtgcgatttattagtcagcgtaacttaaatcaacaacgggtagtacaattcgccaatcacgctgtagaggaattagataaagtactgcttcccctacaggcaggtagcgaagtcttgcttccgctgattggtctgccctgctctgtcgcccatttgccattacgtaaacaggcggcaaaactccaaactgtgcgatccattggcctggtgcaagacggcacactttattgctccagcatttttggttatcgcaatgtgcccgtcgtggacattctggctgaacttcctgcaccgcaaccacttttacgcctgacgatcgaccgtgccctgattaaaggcagtccggttttgattcaatggacgcctgcagcgggcagtagcaatgctggggtcatggagatgattaacatcgacttactgacggcaatgctgcttgagccacaactgccgcaaatcagtagcgccagcctgacggtggacaaacggcatttgctctatggtaatgggctggtagattcccttccgcaacctgaagacaatgaaaactatcaggtttctagccaacgctttccttttaccattaacgttaatggtccgggggctacggcgctggcatggcactatcttccaacacaattaccgctggcggtgctgctaagtttactggtgggctacatcgcctggctggcgaccgcttaccgaatgagcttttcccgcgaaatcaatctgggcctggcgcaacatgagttcgaattgttctgtcagcctttgcttaatgcgcgcagccagcaatgtattggtgtagagattttgctgcgctggaacaatccgcgtcagggctggattagtccggatgtgtttattcctatcgcggaagaacatcatttaattgtgccactgacccgctatgtgatggcagaaaccattcgtcagcgccatgttttcccgatgagtagtcagtttcatgttggcattaacgtcgcacccagccattttcgccgtggtgtgctgataaaagatctcaatcagtactggtttagcgctcacccgattcagcaactgatcctcgaaatcaccgaacgcgatgccttactggatgttgattatcggattgcccgcgagctgcatcgtaaaaacgtcaaactggcgattgatgacttcggcaccggcaacagcagcttttcctggcttgaaacattacgtcctgacgtgctgaaaattgataagagttttaccgcagctataggttctgacgcggttaacagcacggtgaccgatatcatcatcgcgctggggcaaagactgaatattgaactggtggcggagggcgtggaaacgcaagaacaggcgaagtatttgcgccgtcatggcgtgcatattttgcaagggtatttgtacgcacagccgatgccgctacgtgattttcccaaatggctggcgggcagccaaccgccgcccgcccggcataatggacatatcacgcccattatgccgttacgttaacgcttactcatcttcatcgtgcgccggttgctctttaacaatgcgaaccagatcaacacgataatcattggcttcaatgatggtgatatgcagtggccctacatcaatcacatcgcccacacggggaatgtgaccatttgcgctgatcacgaggcccgcgaccgtcgcgatatcatcgtcatcggcaaggtgctcaacatcaagcgcctgctgcaaggcatgcaaatctgtaccgccttttaccagccagccgtcaccatcagtaatgatttccggcgtttcgtcagcgtccgggaattcacccgcaatggcttccagcacatccagcggcgtgaccagaccttgtaccacaccaaactcgttggtcacgataacaaagctcccgcgagcacgacgcagcacgcccaacaggttgatcggatcgagggtttccgggacgataatcgccggagacgcgctagcaatcgccgccacatcaacgccctcttccagcgccaccagcagttctttagcacgtacaataccgatgatttcatccagttcaccgcgacataccgggaacagactgtgcggactagagagcagttgctcgcggatttcatcgaccccgagattagcgtcaacccagcttatttcaccgcgcggcgtcatgatcccgcgcagagaacggctcgccagcgtcagtacgccgttaatcatgtaacgttcttcttcggcaaatgcaccttccgggatcggcatcggcatcgggttatcggcatcgtgctgaacattggcctgacgtttcccgcccatcaaacgcaggatggcatcggcagtacgcgctcgcagcggcaaagtgctctggtggcgaataaagttgcgacgcgcaatctggttaaacacttcgatgatgatgctgaagccaatcgcggcatacaggtagcctttcggaatgtggaaaccgaaaccttctgccaccagactcagaccaatcattaacaggaagctcagacagagcaccaccaccgtggggtgctggttaacgaatcgcgtcagcggtttggatgccagcaacataaccgccatcgcaatcactaccgccgccatcatcaccggcagatggttaaccatccctactgcagtaattaccgcatccaagctgaagacggcgtcaaggatgacaatctgtgtgacgaccacccagaaactggcgtagcctttaccgtggccggaatcatgatcgcggttttccagccgttcatgcagttcggttgttgctttgaacagcaagaatatccccccgaacaacataatcaggtcgcgtccggagaaggagaaatccatgacggtaaatagcggtttggtcagcgtgaccatccaactaatcaggctcagcagccccagacgcataatcagcgccagacttaaccccagcaaacgcgctttatcgcgttgttttggcggcagtttgtcagcaagaatggcgatgaagaccaggttatcgatacccagcacaatttcgagaacaacaagcgtgagtagccccgcccaaatactggggtccattaagaattccatgacaagctcctgcttaaggaatagctattcgacgccagaaataatgcaggcgtaacgacaaaatgcaaacgaaaggtgcggcatagagtgccagaaaggcaggcgttaaaaggcctgatgctgaaatgacgtcggtgacgatccatactgcgggctactgccctatactccatggttgttaaacgggagttaaacatatcagagacgcctctgatttggcaaagatttaccttcctttgcaaacgaatgtgacaaggatattttacctttcgaaatttctgctaatcgaaagttaaattacggatcttcatcacataaaataattttttcgatatctaaaataaatcgcgaaacgcaggggtttttggttgtagcccttatctgaatcgattcgattgtggacgacgattcaaaaatacatctggcacgttgaggtgttaacgataataaaggaggtagcaagtgaccattgctattgttataggcacacatggttgggctgcagagcagttgcttaaaacggcagaaatgctgttaggcgagcaggaaaacgtcggctggatcgatttcgttccaggtgaaaatgccgaaacgctgattgaaaagtacaacgctcagttggcaaaactcgacaccactaaaggcgtgctgtttctcgttgatacatggggaggcagcccgttcaatgctgccagccgcattgtcgtcgacaaagagcattatgaagtcattgcaggcgttaacattccaatgctcgtggaaacgttaatggcccgtgatgatgacccaagctttgatgaactggtggcactggcagtagaaacaggccgtgaaggcgtgaaagcactgaaagccaaaccggttgaaaaagccgcgccagcacccgctgccgcagcaccaaaagcggctccaactccggcaaaaccaatggggccaaacgactacatggttattggccttgcgcgtatcgacgaccgtctgattcacggtcaggtcgccacccgctggaccaaagaaaccaatgtctcccgtattattgttgttagtgatgaagtggctgcggataccgttcgtaagacactgctcacccaggttgcacctccgggcgtaacagcacacgtagttgatgttgccaaaatgattcgcgtctacaacaacccgaaatatgctggcgaacgcgtaatgctgttatttaccaacccaacagatgtagagcgtctcgttgaaggcggcgtgaaaatcacctctgttaacgtcggtggtatggcattccgtcagggtaaaacccaggtgaataacgcggttagcgttgatgaaaaagatatcgaggcgttcaagaaactgaatgcgcgcggtattgagctggaagtccgtaaggtttccaccgatccgaaactgaaaatgatggatctgatcagcaaaatcgataagtaacgtattgtgttgattatcactcagttttcacacttaagtcttacgtaaacaggagaagtacaatggagattaccactcttcaaattgtgctggtatttatcgtagcctgtatcgcaggtatgggaagtatcctcgatgaatttcagtttcaccgtccgctaatcgcgtgtaccctggtgggtatcgttcttggggatatgaaaaccggtattattatcggtggtacgctggaaatgatcgcgctgggctggatgaacatcggtgctgcagttgcgcctgacgccgctctggcttctatcatttctaccattctggttatcgcaggtcatcagagcattggtgcaggtatcgcactggcaatccctctggccgctgcgggccaggtactgaccatcatcgttcgtactattaccgttgctttccagcacgctgcggataaggctgctgataacggcaacctgacagcgatttcctggatccacgtttcttctctgttcctgcaagcaatgcgtgtggctattccggccgtcatcgttgcgctgtctgttggtaccagcgaagtacagaacatgctgaatgcgattccggaagtggtgaccaatggtctgaatatcgccggtggcatgatcgtggtggttggttatgcgatggttatcaacatgatgcgtgctggctacctgatgccgttcttctacctcggcttcgtaaccgcagcattcaccaactttaacctggttgctctgggtgtgattggtactgttatggcagtgctctacatccaacttagcccgaaatacaaccgcgtagccggtgcgcctgctcaggcagctggtaacaacgatctcgataacgaactggactaacaggtgagcgaaatggttgatacaactcaaactaccaccgagaaaaaactcactcaaagtgatattcgtggcgtcttcctgcgttctaacctcttccagggtagttggaacttcgaacgtatgcaggcactgggtttctgcttctctatggtaccggcaattcgtcgcctctaccctgagaacaacgaagctcgtaaacaagctattcgccgtcacctggagttctttaacacccagccgttcgtggctgcgccgattctcggcgtaaccctggcgctggaagaacagcgtgctaatggcgcagagatcgacgacggtgctatcaacggtatcaaagtcggtttgatggggccactggctggtgtaggcgacccgatcttctggggaaccgtacgtccggtatttgcagcactgggtgccggtatcgcgatgagcggcagcctgttaggtccgctgctgttcttcatcctgtttaacctggtgcgtctggcaacccgttactacggcgtagcgtatggttactccaaaggtatcgatatcgttaaagatatgggtggtggcttcctgcaaaaactgacggaaggggcgtctatcctcggcctgtttgtcatgggggcattggttaacaagtggacacatgtcaacatcccgctggttgtctctcgcattactgaccagacgggcaaagaacacgttactactgtccagactattctggaccagttaatgccaggcctggtaccactgctgctgacctttgcttgtatgtggctactgcgcaaaaaagttaacccgctgtggatcatcgttggcttcttcgtcatcggtatcgctggttacgcttgcggcctgctgggactgtaagactgttgtacactaccggggccttttggccccgtttttttatctggaggattaatgacaatcacggacctggtactgattcttttcatcgccgcactcctggccttcgcgatctacgatcagttcatcatgccccgccgtaacggccccaccctgctggcaattcctttgctccggcgtggtcgcatcgatagcgttatcttcgtcggattgattgtcattcttatctataacaacgtcacgaatcatggtgcgttaataacgacatggttattaagcgcactggctctgatgggtttttatatattctggatccgcgttccgaagatcatctttaaacaaaaaggttttttcttcgccaatgtctggattgaatatagccgaatcaaagcgatgaacttgagcgaagatggcgtgttggtgatgcaattagaacagcgtcggctgttaatccgcgttcgaaatatcgacgatctggaaaaaatttataagcttctcgttagtactcaataagttatgaatttagccaaagctatgtttagtgtatttttaataatcagacatagcttaggctatattacctcttcccttatttgttatttattttaacgtttcattgatatataaatccaaatgaaaatcgttatcaataaagcaatgaaataatatattccaacagttgttttatattctcaaaatatgttaaggttgcgccctcatttggggagtagccgatttccagattccggaaatgtacgtgtcaacatactcgttgcaaaacgtggcacgtacggactgaatactttcagtcaggcgagaccatatgcacatcaatcgctatgcctgcatgaacgcgaaaaccatcacggcttgttgttcatgtatgcatgtttgctgggggcgatgatgtgttttatggataccccggtcaggacattgtcatgaatatcactgctactgttcttcttgcgtttggtatgagcatggatgcatttgctgcaagtatcggtaaaggtgccaccctccataaaccgaaattttctgaagcattgcgaaccggccttatttttggtgccgtcgaaaccctgacgccgctgatcggctggggaatgggcatgttagccagccggtttgtccttgaatggaaccactggattgcgtttgtgctgctgatattcctcggcgggcgaatgattattgagggttttcgtggcgcagatgatgaagatgaagagccgcgccgtcgacacggtttctggctactggtaaccaccgcgattgccaccagcctggatgccatggctgtgggtgttggtcttgctttcctgcaggtcaacattatcgcgaccgcattggccattggttgtgcaaccttgattatgagtacattagggatgatggttggtcgctttatcggcagtattattgggaaaaaagcggaaattctcggcgggctggtgctgatcggcatcggcgtccagatcctctggacgcacttccacggttaataagaacgctgccagaggtgaatattaaagtccgtctggcagtcgaacacttcttttgctgccagtgtttgccagacttctggcttcgcacgccaggcaaacggcgtcatctgcaataatgcgacggcttcatcaccgcgaagacgcatcggataacacaactccgcactctgctgtaatgtaaaaccttccagttgttctgcatgaggtgcatgaagatgtacttcattgtaaatcagccccttcagctccatcaaatgtcgcggtcccggcgtggcagtaatgacccagccgccgggcttcactactcgtgctaattcttctgctttacacggcgcgtaaatacgtattatggcgtccatactggtatcggaaaacggcaaacggtggctggaagcgacacaaaaagtgacctgcggatagcgtttcgccgccgcttttatcgctaccttgctaacatccagaccaaacgtggtgatttcgggcaacgcatcggcaaatgcgtgtgtgtaatacccttcaccacagccaatatccagcaccgccgtggccttatcatcaagccgttccctcagttgggcgacaattgcatcacgcagcggctgataatgtccggcatctaagaatgcgcggcgtgcttgcatcatttccgcgctgtcgcccggatcacgagaccgtttatgctgaacgggcagcagattgacatacccttctttcgccatatcaaactgatgtcgctggggacagatatagctgtttttttcacggctaagaggctgatggcaaagtggacaggaaaaagacatgacaactccggcaggatactaaaggccgcaagtgtaacgcgaatcacgcggcgggcaaatatccgaacgccaggagcgaagataaagcatagtaaaaagcctcgcattcgacgaggctttatagcgagattgaagcgtattcacacttcagatcagtggattcgatcagatagctgttacgttaacagctgccggacctttctggccgtcctgaatttcgaactcaacgttctgaccttcagccagagttttgaagccattaccctggatagcggagaagtgtacgaacacatctttgctgccatcagccggagtaatgaagccaaaacctttagactcgttgaaccacttaacctgacctttaatctttgccatttgaaaaattccttagattgttttcttcgcccgcaggcataacatagataaaacactcacattactgcaactggcaccaatataaggctcggcagagaagcggtattcaacgtcaacgtgtttactcaggacttctttactgaaaatgccacacataaacagaactgtacctcgtttaacccgaaatctgttatcacatacaacgttaattatggcaagccatttttaaacatgtctcgatcagacgcacaaatctcgatacgtcttccactttttttgcacacttatgcaacggaatacgcgccgatatatcattgtgcttaaccttgccagttcaggcagatacttaaactggcgtattttctaacatagttcaataagttcagttgttccaggccagtgggagaagttattacatagtgcgtgcaatatcacattttttgctatgcaatgaataaaaagttatatcactttttctcataaaacagtcagttaacggctattaattaccctaaagagaagtcaatccccaaagggattgtaaatttaaaataagaaaaattgatgaatgagcaaaaaaatcaagagagaaacgtttcgctaataaataataccacgcttaatcacaaatccgatgtaaacatcctaataaattaatggggtaaatatctttttctgatatcccgttacgcaaataaataatatgataattatttgaagtcagaccagagttttaatttgaagcagttgcaccatgacagtgcgtataatcaggatgaattgagtaacccttcaacgacggggttactcaagattgaggaaggattatcgttcggcgaccagacgaataatatcttcgtcttcaacgcttttttgactctcaacggtctttttatctgctttctctggttcgtttgcttcgcacaaacgacgtaacagtgcattttgacgtttttgctgatccagcaacgcctcaagcagttcaatctgttcgttagtccgactactggcacgattgataaaaaaccacaagatgagcccgataagaagaaccaccacgcttacaaccaaagacgcaatgttcatcacgccactatttacaacttcgttcatttcaccacctctgagtagaggcgctattctaccactgctggagaggaagaaaatctagtgctgaaaaaatgatatcaccacgggataaactggttaatggcacaaattccgctgaaaaattgtacatcctgatcgcacatcatgttgaatacctgcgcccaaagcagcaagcaagccaacaccacgacaaccagaacgacccatcgaaactttttcactccaatctccgtttcacctaccttatgtcattaaactagcatgcgttagttaaacagcgcctaactatgtcgatattcgtgctttttcggaatgagtcgcttgcttcagcgcatattgccgctacgattaagcgaacataaaaagagaagaggttgtaatgcgattcatcattcgcacagttatgctgatagcactggtatggataggattattactcagcggatatggcgttttgattggaagcaaagagaatgccgcaggattaggtttgcaatgtacctatctgactgccagaggcaccagcacggtacaatacttgcacactaaaagtggtttttttggggataacagattgcccgctgttacgcaaaagcaatatcgtggtcgataatggttaagggcaataaataaccagattctcactcctgagtaaaatactcttatagcaagcgcgtttaatataacgccaccttcaactttatttttctcatgctaaataaagaacctgtctgtttgatattccgacaggttcttactctcatcagaacggatagtcgtgataacccatttgggcagaaattttgcgcgctgcggtatgcaacattgcgacatattcctgtaaacgctcttcagagaaacgcaacgtcgggaaggagatgctcaaaccggcaatgaccacgccaaagcgatcaaataccggtaccgcaatgcatcgcagcccttcttcctgctcttcattatcttcgccatacccctgctcgcgcacctggtccagaacgggtaataacgcttctgtactggtgatggtccgctcggtactgcgtttatactccacgccctcaagaatttgcttcacttcatcgcgatcgcgccatgccagcagtaccttaccaatcgcggtgctgtacagcggattacgacgcccaatccgactatacatgcgcaaattgtacatagagtcaattttgtgaatgtaaacaatactgtcttcgtccagtgcgccgaggtggatagtttctttggtcaggcgggagagctcacgcatctggatatctgcgctacgaattaaatcgacgttttgtaacgcgcgagcgcccagttcaaacaatttcagggtcagggaatatttctcgctctccccttcctgcgccacataacctaaggttttcatggtctgtaaaaagcgataaacggtgcttttactcatcatgacgcgctggctcagctcggttatccctatttcgcgctcttcacccagcgcctgcaaaatgccaaaaacttttagcacggaagatacagaatcaggctgtttatccagatctgcgttagccatttatcacctcattgcgagtgttttataaaaatcagaactgttttttattataatttcgcaccagggtggtcgcaatccatcttttgccggttagttacaattctgcgacatccaccgtgaatatcagtgctagaatcatacccctgttgattattcaccaaagatataaaattcctatgccaaaagttcaggccgacggcctgccattgccccagcgatacggtgcgatattaaccattgtgattggtattagcatggccgtccttgacggcgcaatcgccaacgtcgccctgccaacaatcgccacggaccttcatgccacgccagccagttccatctgggtagtgaacgcctatcaaatcgccattgtcatctccctgctcagctttagctttctgggcgatatgtttggctatcgacgtatttataaatgcggtctggtcgtttttctgttgtctagtctgttctgcgccctttctgatagcctgcaaatgctcacccttgcgcgtgtcatacaaggtttcggcggtgcagcgttgatgagcgttaataccgcacttatccgcctgatctatccacaacgttttctgggtagagggatgggcataaacagctttattgttgccgtctcttctgctgccgggccgacaattgctgcagcaatcctctccatcgcatcctggaaatggttatttttaatcaacgtaccgttaggtattatcgccctgcttctggcgatgcgttttctgccacccaatggttctcgcgccagtaaaccccgtttcgacctgcccagcgccgtgatgaacgcgttaaccttcggcctgcttatcactgcgttgagtggtttcgctcaggggcaaagcctgacgttaattgctgcggaactggtggtaatggttgttgttggtattttctttattcgccgccagctttctcttcccgtaccgctgctaccggtggatttactgcgtatcccgctgtttagtctttctatttgcacatctgtttgctctttctgcgcacaaatgctggcaatggtttccctgcccttttacctgcaaaccgtgctcgggcgtagtgaagtcgaaacaggtttacttctgacaccgtggccgttagcaacgatggtgatggctccgctggcaggctatttgattgaacgcgtacatgcaggattgctgggggctttagggttgttcatcatggctgcggggcttttttccctggttctgctgcccgcgagtcctgcggatatcaatattatctggccgatgatcttatgtggtgctggatttggcttattccagagtcccaataaccacaccattattacctccgcgcctcgcgaacgtagcggtggagccagtggcatgttaggaacggctcgtctactgggtcagagtagcggcgcggcgctggtggcgctgatgctaaatcagtttggagataatggtacacacgtcagcctgatggctgcggctattctggcagtgattgctgcctgtgtcagtggtttacgtatcactcagccacgatccagggcataaaaaaagcgcgtcgatcaggacgcgctttttagtatttacttcatattacttcaggtattcacccgtacgcagagcttcaattcgtttatccagcggcgggtgggtcatgaacaactcactgaggcttttgctcttaccgttaatgcagagagccatcatgctggttgcttcttgcggttcatagctggttttcaggcgctgcagcgcggcaatcattttctcgcgaccaaccagttttgcgctaccggcatcagcatggaattcacgatgacggctgaaccacatggtgataatgctcgccagaataccaaacaccagttccagaaccgttgcaaccgcaaagtagatcagcgggttgccgttgctctcttcaccttcatcacgatttccgcccataaaacccgcggcaagctgcgccagaatacgggaaataaagataacgaaggtgttcaccacgccctgaatcagcgtcatggtgaccatatcaccattggcgatgtggctgatttcgtgagcaattaccgcctcggcttcatccgggctcatgttctgcagcaaaccggtgctgacagcaaccagagaggcatcacggcgcgcaccggttgcaaaagcgttgatgtccggcgcatggtagatagccacttgcggcatagcgatccccgcctgacgagcctgggttgctacagtattgaccagccaacgttccctttcgttacgcggttgctcgatcacttccccgccaacagatcgtaatgccatccatttggacatcagaaggctaacgaaggaaccaccaaaaccgaacagcaaggccatgatcatcagcccctgaacgctgctgctctgtatccctgtcaggctcagtaccagcccgaaaacgaccattacggccaggttcgttagcaggaagagcgcgattcgcatcataattttctttttacctcagtttaacaaaacgcaatatgcgatacccacatcgtatgggttacgcgactattttcaagtctggatagtgcgtaagtcaccagaaagacacaactttacattttgtagcatctgatttacggcatcttgtcgctgttaaaaaatcaggcacaatttcttgtgcctgattgatattacttgacgggagcgggttgttccgcgggtctggctttttcaagcttcgccagatcgagtgcgatattcaccgtctcatccagataaggatccggctcctggtaatctttcggtagatcatccagtttcttcaactccggtttaccttcgcgtttaaagcgttcgttcaaacgcgccagacgcgtcgcatcatcttcattattctctttctcacgcacagcgtaattcagagaaacgatattgcgcttgtccttcatagcgttgaagcgcgcgatatccttcatgatgttctggaactcaggatctttcgcgatacgcgcattatgttccttcagcagctccggttcaaaggccgttaaatctccacttttcacataagtcgcggcatcaatgctatcccacggcagcgcgttatcttcgaatttctcacccgtttccgtttcttcattacccgtcggcatgatgatgtctggcgttacgcctttacgttgcgtactgccgccgttaacgcgatagaatttctggatcgtgtactgcacagaacccagcgctggccattcaggacgtaacatctgatcgtaaatacggttcaaactacggtattgctgaacggtgcctttaccaaacgtcggttcacccacaaccagcgcacgaccgtaatcctgcattgccgcggcaaagatttcactagcgctagcactgaagcggtcaaccagcaccaccagcgggcctttatagaaaacctgtccgtcggtatcgctatcttcacgaaccttgccgttgttatcgcggacctgaacaatgggacccgcaggaataaacagaccggagaggcttacggcttcagttaacgccccaccgccattgctacgcaggtcgatgatgacgctgctgacattctgtttttccagtttctgcagttgcactttgacatcgtctgtcaaacccacatagaagcccggaatatccagcacgccgactttctctttaccgacggtcttcacgctcattttaaccgcgcggtcttcgagacgaatacgttcacgggtcaacgttacagtacgggtcttggtccctttaccagcaggtaaaatttccagacgaactttactgcccttcggccctttaattaaggcaaccacatcatcaagacgccagccaatcacgtcaaccatcggcttgcctgtttgaccaacaccgacaattttgtcaccaacgctgatagctttactcttcgctgccggaccacctgccaccatgctattgataacggtgtagtcatcatccatttgcagcactgcgccaataccttccaggctcaaactcatttcagtgttgaactgttcggtattacgcggggaaagatagttggtatgcgggtcgatttcacgcgcaaacgccgtcattgccaggctgaaaacatcttcgctgttggtttgcgccagacgacgaatggcaaatttgtagcggcgagtcagggtttcacgaatttctttatccgtttttcctgtcagcttcaggcttaactcgtcgaatttgactttactgtcccacagcgcgttcaactcagcctcgtttttcggccagggcgctttgctgcggtcaaggttataagtgtcgttgccggtgaaatccatcggcttttccagtacgctcaaagcgtactggtaacgctcaaaacggcgcttttgcgccagattgtagagatcgtagaaaacgtcgagtttgccactacgcagttcatcgcctaactcggttttctttttcgcgaactgttcaacatcgcttgccagcagcacgttgtggctgtaatcgagcagattcaggtagcggtcaaagattttggcgctaaatgcctgatcgaggtcgaactggcgataatgagaacgggtgaagcggctcgttacgcgctcacttaccgtcgcatgctgcgtctcttcctttaataccggaatttgatcagcacgcgtgatatcttctacagcgaaggtctggcctgctattgcaagcaggccagctaacgcggtaagcctaaaaaacatgttcatgcctggcccggcctccgtttcagaacaccaggtgttctgcgcgcacaatcaaagacataccgctattcagctggacgcggacgccgtctttggtgatttctaatacggtggcatccatcgcgttttgacccgctttcaccttcagggcttgtccgacagtcagagcactaatgtcagaaaccggggtgtgctgttcttcgcgaggtgcttttactgtttttggcgctttctctaccggcttttgcgcacgaggtttacgttcagcgccttctttgcggcgtggcgtagtcggacgtggcttgcgttcgcggcgcggtgcgtcttctttctcaccagcagttgcggcagcttcgcgttttttcgcttgttgttcagcacgctgtgcctgaacacgcgctttcgcttcttcaagctgcttgcgagcatgctctacatgttgctcgtccagctcaccgcatgggttgccgtcaagatcgacacgcgttgcgccgggtttaacaccgtaaagataacgccagctgctagtgtagagacgtaaagcggatcgcaattgcgttttgctcaggttcatttccccagcaacacgatcgaccaaatcctgaaaaataccgattttcagcggacgcgcttcaccttccgcactgaaacagtggggaaaacgttcggccagaaacgcgattacttctttactgctattcaacttaggttgattttccatgaaatttcctgattacaacggacgtagccaacaagcgcaggcatgaacaggcgtcattataatgacgctatcagtaaatgctacgttatccgttgattatcctgcgacgctcgcaaagaattttttgtaatccgtcgttgcaagcactttttcaagctgtgccacaagctgacgtaagccttgctcgtcctcgtctgtaaagcgaccgaagacggtactatcgatgtcgagaacaccaataatctgatttttcaccaccagcggcagaacaatttcagaattactcgccgcatcacaggcaatatgcccgtcaaacacatgaacatcctcgatacgctgcacttgattgcgggcaaccgcagtgccgcacacgccgcgcccgacgggtatccggacacaggcaattttgccctgaaatggtccgagtaccagtgtatcgtcctcaagcaaataaaaacctgcccagtttatgtcagtgagacgctcatataacaacgcactggtgttcgcaagcgttgccagaaaactggtttctcccgccatcagcgcgttaaagtcgcgatttaaatccgcgtaaaattctgttttgttcattatataatcacttggttgtcttacctggatctgccagcctattaaaataagcattaaatgcgttaatgctcaagatcattcccatcatgggttaagattaatgttaattcttattacatttggcacgtcatggctcttaacacaccacaaattacgccgacaaaaaagataacagtgagggcaatcggcgaggaactgccgcgtggtgattaccaacgttgcccgcaatgtgacatgctgtttagcctgcccgagataaattctcatcaaagtgcctattgtccgcgctgtcaggcaaaaattcgtgacgggcgcgactggagcctaacgcgcctggcggcaatggccttcaccatgctgttgcttatgccgtttgcctggggcgaaccgctgttgcatatctggctgttaggcattcgtattgacgccaacgttatgcaaggcatctggcaaatgaccaaacagggcgatgcgataacggggagcatggtctttttctgcgttattggtgccccgctcattctggtgacctccatagcttatttatggtttggtaaccgactgggaatgaatttacgtccggtactgctgatgcttgagcgacttaaagagtgggtaatgctcgatatctacctggtcggcattggcgttgcttctataaaggtacaggattatgcccatatccaggctggtgtcggcttgttctcttttgtggcgttggtgattttaacgacggtgacgttgagtcatcttaatgtcgaagaactgtgggagcgattttatccgcagcgccccgctacgcgtagggacgagaaacttcgtgtctgtcttgggtgccattttaccggctatccagatcagcgtggtcgctgcccgcgttgccatatcccgctacgcctgcgtcgccgtcatagtctgcaaaaatgctgggcggcgctgttagcgagtatcgttttattgttacctgccaacctgttgcctatttctatcatttatctgaacggaggacggcaggaagatacaattctttccggaattatgagcctggcaagtagcaacattgcggttgcaggaatcgtgtttatcgccagtattctggtaccgtttactaaagtgatcgtcatgttcactttactgttgagcattcattttaaatgccagcaaggtttacgcacacgcattctgttactgcggatggtgacctggattggtcgctggagcatgctcgacctgtttgtcatatctttaaccatgagcctgattaatcgcgatcagatcctcgcttttactatgggaccggctgcgttttatttcggcgcagcggtaattttgactattcttgctgtggaatggctggacagccgcttactttgggatgcacatgagagtggaaacgcccgcttcgacgactgaataaccgcttactttgggatgcacatgagtcaggaaacgcccgctagcacgactgaagcgcagattaaaaataaacgccgtatcagtcctttctggctgctgccgttcatcgcgctaatgattgccagttggctgatttgggacagttatcaggaccggggtaataccgtcaccatcgactttatgagcgcggatggtattgttccaggccgtacgcctgttcgttatcagggcgttgaagtcggaacagtgcaggatatcagcctcagcgacgatcttcgtaagattgaagtcaaggtcagcatcaagtccgatatgaaagatgcgctgcgcgaagagactcagttctggctggtgacgccaaaagcaagcttggcaggtgtctccgggctggacgccctcgtcggtgggaactatatcggcatgatgccgggtaaaggtaaagagcaggatcactttgtcgcactcgatacccaaccgaaatatcggctggacaatggcgatctgatgatccacctgcaagcccccgatctcggtagcctgaacagcggtagtttggtctatttccgcaagatcccggtgggaaaagtctacgactatgccatcaatcccaacaagcaaggcgtggtgattgatgtcctgatcgagcggcgttttaccgatctggtgaaaaaaggtagccgtttctggaacgtttccggcgttgatgccaacgtcagtatcagtggcgcgaaggtgaaactggaaagcctggcggcactggttaacggtgcgattgccttcgatagtccagaagagagcaaacctgccgaggcggaagatacctttggtctgtatgaagatctggcccacagccagcgtggcgtaataataaaactggaactgccgagtggggccggattaaccgccgacagcacgccgttaatgtatcaggggctggaagtcggacagctgactaaactggatttaaatcctggtggtaaagtcacaggggaaatgaccgttgatcccagcgtcgttaccctgcttcgtgaaaatacccgcatcgaattacgcaacccgaaattatcccttagcgatgctaatctcagcgccctgctgaccggcaaaaccttcgagctggtgcccggcgatggcgagccacgcaaagagttcgttgttgtgccaggcgaaaaagcactgctgcatgaacctgatgttctgacgctgaccctgaccgcgccggaaagttacggtattgatgcgggtcagccgctcattcttcacggcgtgcaggtaggccaggttatcgatcgtaaactcaccagcaaaggcgtcacctttaccgtcgccatcgagcctcagcatcgcgaactggtaaaaggcgatagcaaatttgtcgtcaacagccgtgtcgatgtgaaggtggggctggatggcgttgagtttctcggtgccagcgccagtgaatggatcaatggcgggatacgtattctgccgggcgataaaggtgagatgaaagccagctatccactgtatgccaatttggaaaaagcgctggagaacagccttagcgatttacccaccacaaccgtgagtttgagtgcagagacgctgccggatgtgcaggcaggaagcgtagtgctgtaccgtaaatttgaagttggtgaagtgattaccgtgcgtccgcgagctaacgcgtttgatatcgatctgcatattaagccggagtatcgcaaccttctgaccagcaatagcgtgttctgggcagaaggcggggcgaaagttcagctgaatggtagtggtctgaccgtacaggcatccccgctctccagagcattaaagggagccattagcttcgacaacctcagcggtgccagcgccagtcagcgtaaaggcgataagcgtattctgtatgcttccgaaacagcggcccgtgcggttggcgggcagattacgcttcacgctttcgatgccggaaaactggcggtcgggatgccaattcgctatctcggtattgatatcgggcaaatccagacgctggatctgattaccgcacgcaatgaagtacaggcaaaggcggtactttacccggaatatgtccagacctttgctcgcggtggtacgcgcttcagtgtggtcacaccgcaaattagcgcagctggcgttgagcatcttgatactatcctccagccgtatatcaacgtcgaaccaggccggggcaatcctcgccgcgactttgaattacaagaggccaccattactgatagccgttacctggatggcttaagcattattgttgaagcgccggaagccggtagcttaggcatcggtacgcctgtgctgttccgtggtctggaagtcggtacggttacaggaatgacgctggggacattgagtgatcgcgtgatgattgcgatgcgcatcagtaaacgctatcaacacctggtgcgtaacaattccgtcttctggttggcaagcggttacagtctggactttggtctgacgggcggcgtagtgaaaaccggcacctttaaccagtttatccgtggcggcatcgccttcgccacgcctccgggtacgccactggcaccgaaagcccaggaaggcaaacacttcctgttgcaggaaagtgaaccgaaagagtggcgtgaatggggaactgcgcttcccaaataatgcccactgctccggcgtgcctgcgccggagcgtttatgctaaactgcgcgcctgtttttttgccagtggtacatgctcgtggcccaacacaccgtttatttcccggacgcctttctgacacaaatgcgcgaagcgatgcctagcacgctcagttttgatgattttcttgccgcctgtcagcgcccgttgcgccgcagcattcgcgttaatacgctgaaaatctccgttgctgatttcctgcaattaaccgctccttatggctggacgcttacgccaattccgtggtgtgaagaaggtttctggattgaacgcgacaatgaagatgcattgccattgggtagtaccgccgagcatttaagtggcctgttttatattcaggaagccagtagtatgttgcctgttgccgccttgtttgctgacggtaatgcaccacagcgggtgatggatgtcgctgccgcgcctggctccaaaacgacgcaaatttccgcgcggatgaataacgaaggggcaatccttgccaatgagttttccgccagtcgggtaaaagtgttacatgccaatatcagccgctgtggtatcagtaatgttgcgctcacacattttgatggccgcgtgtttggtgcggcagtgccagaaatgttcgatgccattttgctggacgctccctgctctggcgaaggcgtggtgcgtaaagatcccgatgcgctaaaaaactggagtccagaaagcaatcaggaaatcgcagctacacaacgggagcttatcgacagcgcctttcatgcattacgtcctggtggtacgctggtttacagcacctgtaccttaaaccaggaagaaaacgaagccgtttgcctgtggctgaaagagacttaccccgacgcagtagagtttttaccacttggcgatctcttccctggtgcaaacaaagcgctgaccgaagaaggctttttgcatgttttcccacaaatttacgactgcgaaggcttcttcgttgctcgtctgcgtaaaactcaggcgattcccgccttacccgcccccaaatacaaagtcggtaattttccgttcagcccggtgaaagatcgcgaagctggacaaattcgtcaggcggctacaggtgttggcttaaactgggatgaaaacctgcgcctctggcagcgtgacaaagaactgtggttgttcccggtgggcattgaagccctgatcggtaaagtccgattttctcggttggggattaaacttgccgagacgcacaacaaaggttatcgctggcagcatgaagcggttattgctcttgccagtcccgataatatgaatgcattcgagctgacaccgcaggaagcggaggagtggtatcgcgggcgcgatgtttacccgcaagccgcgccagtggcggatgatgtattggttactttccagcatcaaccgattggtttagccaaacggattggtagccgattgaaaaacagctatccgcgtgaactggtgcgcgatgggaaactttttaccggtaacgcctgacagcgcacaaaaaaagcgcactttttgactggcacattcggctgcctcaactaggctgaaaaatggtgcgatcggactggtcgtaccacaatcggcagctaaatggagagcacgaagatgaaaaccagtgtgcgcataggcgcttttgaaatcgacgacggcgaattacacggtgaaagcccaggtgatcgaacgttaaccattccttgtaaatctgaccccgatttatgtatgcaactggatgcctgggatgctgaaaccagtatccctgccctgctaaatggcgaacactctgtcctttaccgtacccgttacgatcaacaatctgatgcctggattatgcgtcttgcctgatccaaaaagaacccgtcggcatggcgggttatttgtcctggttattcccccgttgtaaaatctctcctaaacttaacggtacggcaccacacttcggggatgaaatgttcgcgctggtactttttgtttgctacctggatggcggttgtgaagatattgttgtggatgtctacaacacggaacagcagtgtctttattctatgagcgatcaacggatccgccagggcggttgttttccgattgaggattttatagatggtttctggcgacctgcacaggagtacggtgatttttaattattgcaattgcacaagagtcagttcgcccccaaagacagcaccggtatcaatataatgcaggttgccaatatccacgcgatgtcgcaacggtgtatgaccaaaccagaaatgatcagcacctgtaattccctgccctttttggcgttcacctaatcggctgcggctccacaagacctgatgcaaatcaacgtccttttgccattcataaacatcatctggataatcggcatgagcaataatatgcttgccggtgcgactgtgtacttcaagaataaagggcaaatgctgacatttttccagcgccgttttcgcttgtttctgttgattatctgccagcgcaataaaccagtcgccgccattcatcaaccacaaagacatctgctgggatgccagcgcatccatcgccatctgttcatgattgcctcttaccgcacaaacccaatgttgttccagtaactgcagacaacgtaaactttgcggcccacgatcgataacgtctcccacactgataagtaaatctcgccacggatcaaaacgacaatgccataatttgcggcgcaactgctcaagacaaccgtgtatatcgccagaaagccagatatgtcgccattgatgacccgcaattctctgataaacgggcgcaggctgtttcatcaatattttcctcccgcgctaaagatcacataatcttaacaagaatgttaaaaaacgctggactcagacagtagagtgtgtgttatggttgactataaagtcagcgaaggaaatgcttctggcttttaacagataaaaagagaccgaacacgattcctgtattcggtccagggaaatggctcttgggagagagccgtgcgctaaaagttggcattaatgcaggcttagttgccttgccctttaagaatagatgacgacgccaggttttccagtttgcgtgcaaaatggtcaataaaaagcgtggtggtcatcagctgaaatgttaaaaaccgcccgttctggtgaaagaactgaggcggtttttttattggaaatcaaaaggctattttaggtaattaacagagtttttcagctcgttctataaacggtgccagactcattttttcgccgggattgttaggatcatcaatctgaatcacgctaatgggttgggcattggtcttcccactggcaacttccttttgtgcgatatcgtttaaaggatactgcacgagggtactcggattaataacatacaaagcattacccggtcggcaagtcagcatcacctcttcgcgattaaacgcccatttgtctttacccacttcaaaacgactgacggtaatcacctgcggtgcagccagcgccgctgcagaactggtgagtaacagaaacgccagaatactttttttcatcattttcgtaatccatcaaaaaggttcgagagtcgcaagcaggctgatgatcaccagcactaccgcacctatcgcccattcgagtttagtcatccacacaaaccagggtgccgcacgatcttcatcctgcctcatgcgcggtacaagaacataacgattagccagcgcaatgaccaccataatcatcaccaggatggctttgagcaataagagttggccccagtaagtcgtaagcgtggggggaaatccggtaatcaacaatgcattaagcacgccgcttgccagtacgccgatcaccgcaaaatgcccgcaccaggaaaaacgcatcagcgcctgaatagcctggtgtcgccaacggcctttgatgagttgcatacaccagagcaccggcagtaatcccccaaaccacgccgccgcacaaatcaggtgaatcgcgtgattagtctgatggattttcgctgttaccccttcattcagcgtcgcatgccccactcccgccagcagaataaattgcgcggtagtgagcataaacagcaaacgtggcatattccgcggttgcataagggcgacgatcaacgttacgagggcgagaacaatttgccataaccagatgccaccaaactgcgtttgcaaaacagcctgccaaatgtttgggctaaatacatctgtccatcccgttcccatcaacccgccctgaacggcgagcattgcagtggcactgatcaaactccagacggcagcgtgctgttgtaaacgcagaaaacgcttcgccagcaagcgacgaatcgtcaagggggccagccaggcaccgtacattgcgaagccaaaaaccagcatcaggctggtgaaatggataaatcgcagcgcgatccaggtaaacgccagcatgatttatttcacgctaaaggtgtagtgtcctttcgttttatgcccgtccacgctaacaacatgccagtcaacggtgtaggttccgggtttcaggctatcggccagtggaacaatcagttgcttttggtcctgctcatttcgcttcgccggtaatgttttaatattttcgttttttggccccgtgatttttgcaccactgaatcctgtttcaacaccttcgctgaagtttaaagtgattgcctgcggtgcagctgtcacttgcgcgtttgccgcaggatactgatgcgttaaatgcgcatgtgcccagacggaaggtgtcaccaagctagtggtcaggattgccagcgcgtagcgaagggagcgtgcagtactagccatattatctattcctttttgtaataacttttttacagagcataaccttgtctaatgtctgagtcgaggatcatcaattccggcttgccatcctggctcactcttagtaacttttgcccgcgaatgatgaggagattaagaatgctgaagaatctggctaaactggatcaaacagaaatggataaagtgaatgtcgatttggcggcggccggggtggcatttaaagaacgctacaatatgccggtgatcgctgaagcggttgaacgtgaacagcctgaacatttgcgcagctggtttcgcgagcggcttattgcccaccgtttggctagcgtcaatctgagtcgtttaccttacgagcccaaacttaaataaaacttatacagagttacactttcttacataacgcctgctaaattatgagtattttctaaaccgcactcataatttgcagtcattttgaaaaggaagtcattatgagcttctggaaagttgcagcagcgcaatatgagcctcgtaaaaccagtctcaccgaacaggtagctcatcatctggagtttgtgagggccgccgccaggcaacaatgtcagctgttagtttttccaagcctttctttactggggtgtgattatagccgacgtgcccttcctgccccacccgatctcagtctgttagacccgctttgttatgccgcaacgacctggcgaatgaccatcattgccggccttcccgttgaatataacgatcgctttattcgtggaattgcggtgttcgcaccgtggcgaaaaacgcctgggatctaccatcagagtcatggtgcatgtctgggccgtcgttccagaaccatcacggtggtcgatgaacaaccgcaaggtatggatatggacccgacctgtagtctgtttactacagggcaatgtctgggagaacccgacctgctggcgagcgcccgtcgcttacaattttttagtcatcagtacagcattgccgtgctgatggcaaatgcccgtggtaacagtgcactatgggatgaatatggtcgtctcatcgttcgcgccgatcgtggtagtttattgttagtcggtcagcgtagtagtcagggttggcaaggcgatatcattccattacgctaagctttttcggcctggagcatgccatgttgcgcattatcgatacagaaacctgcggtttgcagggagggatcgttgagattgcctctgttgatgtcattgacggaaaaatcgtcaaccccatgagccacctggtgcgccccgatcgtcctattagtccacaagcgatggcgattcatcgcatcaccgaagccatggtcgccgataaaccgtggattgaagatgtgatcccacactattacggtagtgaatggtatgtcgcgcataacgccagctttgaccgccgcgtactgcctgagatgcccggtgagtggatttgcactatgaaactggcccgtcgtttgtggcctgggatcaagtacagcaatatggcgttatataaaacacgcaagctcaatgtacagacgccgccgggcctgcatcatcaccgcgcgttgtatgactgttatatcaccgccgcgttgcttatcgatattatgaacacctccggctggacggcagaacagatggccgatatcaccggacgtccgagcttgatgacgaccttcacctttggcaaataccgtggcaaagcggtttccgacgttgccgaacgcgatccgggctatctgcgctggttatttaataacctggacagcatgagcccggagctgcgtttaacactgaaacattatctggaaaatacttaatccgcaggcgtagcgggtaatgttccctgcgccagcgcgaccagaaaagcatattccatcgctacgccttcgtagcttttaaagcgaccagatttaccgccatggccactgtccatgtcggtacagagcaataaaagatggtcatcggttttcagctcgcgcaatttagcgacccattttgccggttcccaatattgcacctgagaatcgtgcaaaccggtcgttaccagtaaatgcggataagcctgtgcggtgacgttgtcatacgggctgtagcttttcatgtactcgtaatattgcggatcctgcgggttaccccactcttcaaactcaccagtggtaagaggaatactttcatcaagcatcgttgttacaacatcaacaaacggtacctgggcgataacgccgtggaataattccgggcgttgattaattgcaacgcccatcaacatgccccccgcactcccgcccatcgcataacaaaggctaggagagccatagcccagttttaacaatgcatcgcaggcatcaagataatcattaaacgtatttttcttcttcagaaattttccgtcttcgtaccattgttgccccagctcaccaccgccgcgaacatggacaatggcgtagacaaagccacgatctaacaaactcaagcggctaaaactgaaatcggcatcaatacttgcgccgtaagaaccatagccatacaccagcaacgggttgtgtcctttgcgaaaatgtttgcgatggtagaccaagctaaccggaacttcgacgccatcacgggcgactatccacaggtgttcactgcggtaattcgccgcataaaaaccaggaacttccgtttgttttaatacacgacgctcaccggtatccatatccagttcaaacaaagtgtctggtgtagtcatggaagaataaccataacgcaatcgcgcggtttcaggttctggattgtaggcaatccaggtcacataggccggatcatcaaaggcaataccaatgacttcccgggtcttgcggttaatttggcgcaaactggttaacccgcgctgacgctcttcaaccaccagccagtcggtaaacagcgtaaacccttccagcatgatgttttcgcgtggcggaattaactcttcccactgttgctcatcacgcatacgggtacggtataagccaaagtttttgccgtggcggttggaacgcagataaaaacgatgctggtagtgatcaaggctgtattcgtgatctttgcggcgcggcagaaaaacaaacggctcggcatcggccatttccgcgtccagcaggcgaacttcactggtggtggcgctggccaaatgaatgactacatagtgcttgctggtcgttttatgcaggctgacgtaataggtatcgtctttttcttcgtagatcagtttatcttggcttgctggcgtaccgatggcgtgacgccagacctgataaggcagcagcgtcaccggatgcttgcgaacatagtagaaaatccaggagtcatttgcccagacaaagctgggttcaacgttatccagcagttccgggtaccagttaccagtttccagattacgaaaacgaatgccgtactggcgtcgggaaagaaaatcttctgccagcgccataatggtgttatcgggcgtaatcgccattccgcccatgctataaaactcactatgagctgcgcgcttattggcatcgagcaatgtttcccactcatcccactcttcactgaatgcgctttgacgctggtagatagcatattcacagcctggttcataaatatgccgatagcggtagccatttttgatgtagggcgcagaaacttctcgttgcggaatgcggtcgatgatttcctttaagatgcgatcctgcaaggcttgttgactggccatcacccgatgaccgtaactattttcttgttgcaggtagtccaggacttctggctgagaacgcgtatcgtcccgcagccagtagtaattatcgatgcgcgtatcgccatgaagcgtcatggcgtggggaatgcgggcggcttttggtagcatgttattgttctttctggttgaaacatcttataagggtggcaaaactcaccggggatgcaagcgaaacaggggagtcattgcttagatgatgacaggtaatggcgcggatatcgaatgttatgcagacagagaaaatcagcctgttcaaatggctgtgcgattctggatagcccgaaatagtcaacttcaggctatccagagagcggaattattccgccaaagtgcgtttttgctgttcgagatcgcgttcaatgccgtcacgaacatcctgggggattttcagcgcgtcacccagtgcattcaggtaactgcgttccataaaatggtcaatatcaatagccgcgcaactcaggaaatagatttccagcgcctcttcttcattgcggaccccggtagccaggcgttgtggatccagcggttgttcgattgcctgctcaatgagtacacgcccctgctcttccacgccggctccacgcaattgctggtcgattgccgcacgttctttggcatcaatatgaccatcacttttagcggcaaagaccagcgcaaggatcaaacgtgctgtacgctcatccagcggcgtactttgcgcgccaaactgcggttcgtcctgatgcgccgcgcgaattttatctttgtatttattccacagcaccgtacccgctaccgctccgccgccaaccagtaacgcgttggtgccatatttcgtaagaagtttacgtgcacttttatttgcgaccagcagcccagccagtccgcctaatgcgcctggcactaacagtttgaccaatccctgatccgcagagctggaggtagaagaactgctttgcccaagcagggattgcagttgatttaaccagttagccatatttgctcctcaataaccatttttagtgcctgtagcatagcggatgaggatgtcagaaaatgtatatcgagacaaaagatgcgcaaataagcggggcggtaggccgttattcaaagaaattcgcgccaggtaaggtatttactgtatatcaggtgataagggtattttaggtgaaagtagtttgtcgttttgagtggcattgtttgatgctgattgcccgatgcgacgctgttgcgtcttctcaggcctacgattgtggtgcgttctggggcggacaaggcactcgcgccgcatccgccaacagtcaatcgaattatcagaagccattaacgccgctgatattccgccattcccgctttgcagtccacgctgacctggtaatgaatatcggcacttttaccacgcacggttagcggtacactccatttatcatctttaccctgaatgtcctgcaaactgacccaagccacgggatcggcctgaccgacaattttttgatcatctgcccaacgcgccacgcgattttgttgataatcacgttttacgctcgcggcaattccggcagcatccagatcttcacactttgggaaagtgacgctcttgctggtttcattattggcagcgaaaacacttgcgcaggcagaaaccaacaacagccctaaaaacgcccctctttttttcatgtttttctccatagcacaatgattcaggagaaagcatggtacaaattgtcaggagcgcaagttgcttcaggccgcgtgactggcatcttcctcttcggattcagcaccgacgacctgtggggacggtaatttgccggttttcagaatggtgctcagcacatctttttgttctgccagccataggctaagggcttcacgttgctcgtcttccatttgcactggagaatttgtcagccaggtgtcaagcagatccgccgtatcaagcattttgtcataagcatcggcttcctttttgctggtaaagctcattttctcttcgccctcacgaatgactacgtatttaacttcaaccgccatttgcagcctctcataataactgtgattttatacagtatatttcttttcggttgagaaatcaacatcagcaataaagacacacgcaaacgttttcgtttatactgcgcgcggaattaatcaggggatattcgttatgacgttattaggcactgcgctgcgtccggcagcaactcgcgtgatgttattaggctccggtgaactgggtaaagaagtggcaatcgagtgtcagcgtctcggcgtagaggtgattgccgtcgatcgctatgccgacgcaccagccatgcatgtcgcgcatcgctcccatgtcattaatatgcttgatggtgatgcattacgccgtgtggttgaactggaaaaaccacattatatcgtgccggagatcgaagctattgccaccgatatgctgatccaacttgaagaggaaggactgaatgttgtcccctgcgctcgcgcaacgaaattaacgatgaatcgcgagggtatccgtcgcctggcggcagaagagctgcagctgcccacttccacttatcgttttgccgatagcgaaagccttttccgcgaggcggttgctgacattggctatccctgcattgtaaaaccggtgatgagctcttccggcaaggggcagacgtttattcgttctgcagagcaacttgctcaggcatggaagtacgctcagcaaggcggtcgcgccggagcgggccgcgtaattgttgaaggcgtcgttaagtttgacttcgaaattaccctgctaaccgtcagcgcggtggatggcgtccatttctgtgcaccagtaggtcatcgccaggaagatggcgactaccgtgaatcctggcaaccacagcaaatgagcccgcttgcccttgaacgtgcgcaggagattgcccgtaaagtggtgctggcactgggcggttatgggttgtttggtgtcgagctatttgtctgtggtgatgaggtgattttcagtgaggtctcccctcgtccacatgataccgggatggtgacgttaatttctcaagatctcagtgagtttgccctgcatgtacgtgccttcctcggacttccggttggcgggatccgtcagtatggtcctgcagcttctgccgttattctgccacaactgaccagtcagaatgtcacgtttgataatgtgcagaatgccgtaggcgcagatttgcagattcgtttatttggtaagccggaaattgatggcagccgtcgtctgggggtggcactggctactgcagagagtgttgttgacgccattgaacgcgcgaagcacgccgccggacaggtaaaagtacagggttaaacccggcaaaaaaacgctacaaaaatgcccgatcctcgatcgggcattttgacttttacagcttagcgccttctacagcttcacgcgccagcttagtaatgcggtcgtaatcgcccgcttccagcgcatctgccggaaccagccaggaaccaccgatgcacagcacgcttttcagcgccaggtagtcacggtagttagccggagaaataccacccgtcgggcagaaacggacctgggagaacggacccgcgatcgcctgcagggctttcacgccgccgttagcttcagccgggaagaatttgaactctttcaaaccgtagtccatacccagcatcagttcggaaacagtgctgatccccggaatcagaggaatagtcccttcggtagcagctttcagcagcggctcggtcagacccgggctaattgcgaactgtgcacccgcttcagtgacttctgccagctgctgtggattcagcaccgtaccggcacccacaatcgcttcaggcacttctttggcgatagcacggatagcgtcaactgcacactcggtacgcagagtcacttccagaacgcgcaccccaccagcaaccaacgcttttgccatcggcaccgcgtgttccagtttttttaccacgataaccggtacaaccgggccggtggtcaggatactttctgcacttgttttccagtttttcatcagagttttctctcgcctgattacaaatttgtcgtcttaaaaagtgatacaggttgcgccctgttcggcaccggacagtttttcacgcaaggcgctgaataattcacgtcctgttcccacgcgactcgcgctcaggtcaggaatgtgcggttcgcgagcagccagttccgcttcgtctaccagcagcgtcagttcgcctgtctgtccattcacacgaatgatgtccccgtcgcgcacttttgccagcagcccgccatcgtaggcttctggtgttacgtggatagcactcggcactttaccactagcgccggagagtcgtccatcggtaactaacgcaattttgaaacaccggtccaataatacaccaagtggcggcatgagtttatgtaattctggcattccgttcgcttttggcccctgatgacggacaacaacgacacaatcgcggtccagcaaacccgcttcaaaggccggcataacgtcatgctggctttcaaaaacaaccgctggcgcttcaatcacctggttctcaaccggcacggcagaggttttcataaccgcacggcccaggttaccgcttaacacttttgtcccaccatgatgagagaaaggttgttcgaaggaagcgatcacattgctgtcgagacttttttccgccccttcccgccagtccagttcaccattattcagccatggttcaagggtataacgagacagaccaaaacctgccaccgtattgacatcttcatgcagcaggcctgctttgagcagttcacgcaccagaaccggtacgccacctgccgcctggaagtggttaatatcggccggaccgttcgggtagagacgtgccatcagcggtacaacatcagaaaggtcagagaagtcatcccagttaatctgaataccggccgcgcgcgccatcgccaccaggtgcatggtgtggttagtggaaccaccggtcgccagcagtgcaacgataccgttcaccaccactttctcatcgatcatcttaccgatcggcatccattcattaccattaccggtcatgcgtgtaacctgacgcgcagctgcggcggtcaaagcatcgcgcagcggagaatccggatgaacaaaagaagagcctggcaactgcatccccataaactccaccaccatctggttggtgttggcagtaccgtagaaagtacatgttcccggcgcatggtaagacgcggcttcactctccagtaaggccatgcggtccactttaccttcggcataaagctggcgaatacgcactttttctttatttggcaaaccgcttgccatcggtccagacggcacaaacaccgcaggcaaatgaccaaagctcagggctgccatcgtcagacccgggacaatcttgtcgcacacaccgaggaacagagcaccatcaaacatgttatgggacagccccaccgccgcagacatcgctatcacttcgcggcttagcaggctcaattccattccatcctgcccctgggtgacaccatcacacatcgccggaacaccgcccgcaacctgaccaaccgcattcgcttcatgcagggctttacgaatgatttctggatagtgttcataaggctggtgcgcggagagcatgtcgttataggaggtgatgatggcgatattgttacgcaacatgcttttcaaagaggctttgtcttctggctggcaggcagcgaaaccgtgtgccaggttaccgcatgccaactggctacgatgaacggtgctagttttcgcttgttctatccgggcgagataagcagagcgagtctcgcggctacgttcaatgattcgatttgttacgcgtaacaattgtggattcataaaggctcctgaaattgagttgtcagagcaggatgattcacaacgcgtttcattcagaggatttatgactgaaacgcctgtaaccggagctcatagggcaaaaacgtttcagtcagtgtaataaaaaaagcctcgtgggtgaatccgcacgaggcctgaaagtgtaaaaattgttctacaatctgcgcaagatcatgttaccggtaaaataaccataaaggataagcgcagatattactcaaactcattccaggaacgaccatcacgggtaatcatcgccacgctggcaacgggtccccaggttccggcctgatacggtttcggcgcatcattgtccatcgcccacgcctcagtaatggagtctacccatttccaggcttcttccacttcgtcgcgacgtacaaacagtgcctgaataccacgcatggtttccagcagcaaacgttcataggcatccgccagatgcgtctgattaaaggtttcactatagctcagatccagcttggtgatttgcaggttatgtttgtggtcaaggccaggaactttattcagtacctggatatccacgccttcatcaggttgcagacggatagtcagtttattctgcggcagatcctgccagctttctttaaacagattcagttcaggtgttttgaaatagaccacgacttcagaacatttggtcggcagacgtttaccagtacgcaggtagaatggcacaccggcccagcgccagttatcaatgtcgacgcggatcgccacgaaagtttctgtattgctgctcttgttcgcgccctcttcttccagatatcccggcacttttttgccctgggcgaagcccgcagtatattgcccgcgtacggttttttcgcgtacgttggagcggtcgatgcggcgcagagacttcagtactttcactttttcatcgcggatgctgtctgcgctcaggtcagacggcggagacatcgcaatcatgcaaagaatttgcagcaggtggttctggatcatgtcgcgcatctgaccggctttatcaaaatagccccagcgcccttcgatccccacttcttctgccacggtaatctcaacatgatcaatggtgcgattgtcccagttattcacaaacagggagttagcaaaacgcagcgccaacaggttcagcaccgtttctttaccaagatagtggtcgatacggtaaacctggcactcctcgaagtattcgccaacctgatcattgatttcctggctggtcgccaggctcgtccccagcggtttctccatgactacgcgtgccggtttagcattcagttttgcctcgccaagccctttgcaaattgcgccaaaagtgctgggcggcatggcaaagtagttaatggtgatacgatttttttgatccagcatcgcgccgagacggctgaatgcagcagtgtcattgacatcgagattacaaaaatccagacgtgcactcagggtgtcccataaaccttcatcaatggtttctttcatgaaagtttcgagcgcctcgcggacaactttggtatatgccgctttatcccagtcagcacgccctacgccgataatccgggtgtccgggttgagctgaccggctttttccagttgatacagggaaggcagcaatttacgacgcgcaaggtcgcctttcgcgccgaaaatgaccaggtcacaggcctgggctgtttgcgttaccgccatgtcattctccttaagttaactaacccggtacttaagccagggtatacttgtaattttcttacggtgcactgtactgcttttacgagcttgcgaaaactgtaaacgcttatccacccgtgcgattacgggaaaagcgcgcaaagtgcggcaaaactgataaaaaaatcatcgttttccattgggtaaaaatctgacactgatcatgttatgaaaaaaaataacaacttttttatctgcttttgtcattaacacggcacacaggcgtaatatctgacaaaactgcatttcgatttctttcagtgcggaaatcgtcattacccgtgagtctctttacatcatgaatatgctggaaaaaatccagtctcagctggaacatttgagcaaaagtgagcgcaaagttgccgaggtcattctggctagccccgataacgcgatccatagcagtattgctgctatggcactggaagccaatgttagcgaaccgacggtgaatcgtttctgtcgcagcatggacacgcgcggttttcctgattttaaacttcatctggcacagagtctggcgaatggcactccctatgttaatcgcaatgtcaatgaagatgacagcgttgaaagttacacagggaaaatatttgagtccgcaatggcaacgcttgatcatgtccgtcatagtctggataaatctgccatcaaccgcgccgtcgacttgctcactcaggcaaaaaaaatcgcctttttcggattaggctctagtgccgccgttgcccacgatgcgatgaataagttctttcgttttaatgttccggtggtgtactccgatgatatcgtgctgcaacgcatgagttgtatgaattgtagcgacggagacgtggtggtgctgatttctcacactggaagaacaaaaaatctggtcgagctggcgcagctggcacgcgaaaacgacgccatggtgattgccctcacctctgcgggtaccccgctcgcccgggaagcaacgctggcaattaccctcgacgtaccggaagatactgacatttatatgcccatggtttctcgacttgcacagctgaccgtgatagatgtgctggcgacaggatttactttgcgacgcggtgcaaaattcagagataacttgaagcgggtcaaagaagcgctgaaggaaagccgttttgataagcagttacttaatttaagtgacgatcgctaaaaacgactgtcactgtcctaatcttatacgacatccgaatgagattaatttatcgccatcgcggcgttatttcattcggatttcatgttcaagcaacacctggttgtttcagtcaacggagtattacatgtccagaaggcttcgcagaacaaaaatcgttaccacgttaggcccagcaacagatcgcgataataatcttgaaaaagttatcgcggcgggtgccaacgttgtacgtatgaacttttctcacggcagccctgaagatcacaaaatgcgcgcggataaagttcgtgagattgccgcaaaactggggcgtcatgtggctattctgggtgacctccaggggcccaaaatccgtgtatccacctttaaagaaggcaaagttttcctcaatattggggataaattcctgctcgacgccaacctgggtaaaggtgaaggcgacaaagaaaaagtcggtatcgactacaaaggcctgcctgctgacgtcgtgcctggtgacatcctgctgctggacgatggtcgcgtccagttaaaagtactggaagttcagggcatgaaagtgttcaccgaagtcaccgtcggtggtcccctctccaacaataaaggtatcaacaaacttggcggcggtttgagcgctgaagcgctgaccgaaaaagacaaagcagacattaagactgcggcgttgattggcgtagattacctggctgtctccttcccacgctgtggcgaagatctgaactatgcccgtcgcctggcacgcgatgcaggatgtgatgcgaaaattgttgccaaggttgaacgtgcggaagccgtttgcagccaggatgcaatggatgacatcatcctcgcctctgacgtggtaatggttgcacgtggcgacctcggtgtggaaattggcgacccggaactggtcggcattcagaaagcgttgatccgtcgtgcgcgtcagctaaaccgagcggtaatcacggcgacccagatgatggagagtatgattactaacccgatgccgacgcgtgcagaagtcatggacgtagcaaacgccgttctggatggtactgacgctgtgatgctgtctgcagaaactgccgctgggcagtatccgagtgaaaccgttgcagccatggcgcgcgtttgcctgggtgcggaaaaaatcccgagcatcaacgtttctaaacaccgtctggacgttcagttcgacaatgtggaagaagctattgccatgagtgcaatgtacgcagctaaccacctgaaaggcgttacggcgatcatcaccatgaccgaaagcggtcgtaccgcgctgatgacctcccgtatcagctctggtctgccaattttcgccatgagccgccatgaacgtacgctgaacctgactgctctctatcgtggcgttacgccggtgcactttgatagcgctaatgacggcgtagcagctgccagcgaagcggttaatctgctgcgcgataaaggttacttgatgtctggtgacctggtgattgtcacccagggcgacgtgatgagtaccgtgggttctactaataccacgcgtattttaacggtagagtaagtacgttgccggatgcggcgaaaacgccacatccggcctacagttcaatgatagttcaacagatttcgaatattctgaagcaaacttgaacttatcatcaggcgaaggcctctcctcgcgagaggcttttttatttgatgggataaagatctttgcgcttatacggctggatttcgcccggtttgcgagttttcagcaattttagtatccaggtgtattgttctggtcgcggaccaacaaaaatctcgacttcttcattcatccgccgcgcaatcgtatgatcatccgcctctaacagatcatccatcggtgggcgcacctgaatcgtcagacgatgcgtcttgccatcataaatcggaaacagcggtacaacgcgcgcacggcacactttcatcaaacgaccaatcgcgggcaacgtcgctttataggtggcaaagaaatccacaaattcgctgtgctctgggccatgatcctgatcgggtaaataatatccccagtacccctgacgtacgctctggatgaatggtttaataccgtcatttctcgcatgcagacgaccgccaaagcgacgacgcaccgtgttccagacataatcaaaaaccgggttgccctgattatggaacatcgctgccattttctgcccttggctggccatcagcatggcaggaatatcgacggcccaaccgtgcggcaccagaaagataactttctcgttattacgccgcatctcttcgatgatctccagcccttgccagtcaacgcgcggctgaattttctccggcccgcgtattgccaactcagccatcattgccatcgcttgcggcgcggtggcaaacatctcatcaacaatcgcttcgcgttcagcttcactacgttctggaaagcagaggctcagattgattaacgcacgacggcgactgctttttcccagtcgtccggcaaaacgtcccagccgtgccagaatgggatcacggaactttggcggcgttaaagcgatacccgccatcgctgctacgcccagccatgctccccagtagcgcgggtggcgaaaggatttatcaaactcaggaatgtattcgctattattttttttcgtttccatgcttttccagtttcggataaggcaaaaatcaatctggtgatagtgtagcggcgcaacttgccccgcaccaaataaaaaaagccggtactgactgcgtaccggctgcgaatggatgttaattaatcaaaccgtagctgcggcacaatctctttggcctgcgccaggaattcgcgacgatcggagccggtcagcccttcggtacgcggcagttttgccgtcagcgggtttacggcctgctggtttatccatacttcatagtgcagatgcggcccggtactacgtccggtattaccggaaagcgcgatacggtcgccacgtttcaccttctgtcccggtttcaccagaatcttgcgcaagtgcatataacgcgtggtgtagctgcgaccatgacgaatagccacataataacctgctgcgccactgcgtttggcaaccaccacttcaccgtcacccacactaagcactggcgtaccctgcggcatggcgaaatcaacacctctgtgtggtgcaacgcgaccggtcaccggattagtacgacgcgggttaaaattagagctgatacggaactgtttcgccgtcgggaatcgcaagaatcctttcgccagaccagtaccgttacgatcgtagaatttgccatcttcagcgcggatagcgtaataatctttaccttcactacgcaaacgtacgcccagcagctggctttgctcacgtttaccatcaagcatttctcgagacattaacaccgcaaattcatcgccttttttcagtttgcggaaatccatttgccactgcatggctttaatcactgcgctcacttcggcgctggttaaaccggcgtttctggcgctggcaacaaagcttcccccgacggtacctttcagcagattgttaacccactctccttgctgcatttcgctggtcattttaaaaccgttagcggcagtacggtcataggttcgggtttcacgacgagacacttcccaggtgaggcgctgcagttcgccgtccgcggttaatgtccaggagagttgttgaccgattttcaggttacgcaattctttgtcggccgcagccagttgggtgatatcacccatatcaataccatactgattgagaatgctgcttagcgtatcgccagtggaaacaacatattcatgcacgcccgcttcaccggcgattttgtcatccagttcgtcctggggaatggcttcatcttcttgtgcagcttgatcaatcggctcactggcttcaggtaagaggctacgaatttcgttctgttccagctcaatggttttgacaattggcgtggcatcacggtgataaacataaggccgccagacagcgacggccagagtaagaacggtgaggctccccaacataacgcggtgtggtcgcggtaaattattaaacgccagggcgacagagcgggctatctgttgcacgtaatcacttcctcattaatctcctttcaggcagctcgcatactggttggctaattgactcaggaattcactatagcttgttttacccagtttgatattcgtccccaggggatccaacgttcccatacgaacggatgtccctcgtgcgacgctctcaacgaccgctggcctgaactgtggctcagcaaaaacgcaggttgctttttgctcaaccaactgtgttcttatttcatgtaaacgctgcgcgccaggttgaatctcagggttaacggtaaaatgaccaagcggtgtcagtccaaactgtttttcgaaatagccgtaagcatcgtgaaaaacgaaataacctttccccttgagcggcgcgagctcgttaccaacctgcgtttcggtactggctaattgtgcctcaaaatccttcaggttggcgtcaagtttggctcgactttgcggcataagttccactaattttccatggattgcaaccgctgtagcccgcgctatctctggggaaagccaaagatgcatgttgaaatcgccgtgatggtgatcttcgtcacttttttccgcgtggtcgtgatcatcatcatcgccgtgaatacttttcatcagtagcggtttcacatcttcaagctgcgcaatcgttacctgcttcgctcctggtaatttgcttaccggtttttgcataaacgcttccatctccgggccaacccaaacgactaagtccgcgttctgtaagcgttttacatcgcttgggcgcagactataatcatgttcactagcgccgtcaggaagtaaaacctctgtttctgttaccccatcagcaatggcagaagcgatgaacccaacgggtttaaggctagcgacaacggcggcatctgcggcctgtgttgcacctccccagagagcggcggataatgctgcgaaaagaagcgtttttttatgtaacataatgcgaccaataatcgtaatgaatatgagaagtgtgatattataacatttcatgactactgcaagactaaaattaacatgacaagtctggtttccctggaaaatgtcagcgtttcttttggccaacgccgcgtcctctctgatgtgagcctggaacttaaacctggaaaaattttgactttacttgggccaaatggcgcaggtaagagcacactggtacgggtagtgctcgggctggtaacacccgatgaaggggttatcaagcgcaacggaaaactgcgcatcggctatgtaccgcagaagctgtatctcgacaccacgttgccactgaccgtaaaccgttttttacgcttacgccctggtacacataaagaagatattttgcctgcactgaaacgtgtccaggccgggcacctgattaacgcaccgatgcaaaagctctctggtggcgaaacgcagcgtgtactattagcgcgagcattgttaaatcgcccgcaattattagtgctggatgaacccactcaaggcgtggatgtaaatggccaggtggcgttatatgaccttattgaccaactgcgtcgtgaactggattgtggcgttttaatggtttctcacgatctgcatctggtgatggcaaaaaccgatgaagtgctgtgcctgaatcaccacatttgttgttccggcacaccggaagttgtttccctgcatccggagtttattagtatgtttggtcctcgtggtgctgaacaactgggtatctatcgccatcatcataaccatcgtcacgatttacagggacgaattgttttgcgtcggggaaatgatcgcagttgatttaacgtcggggaaatgatcgctcatgattgaattattatttcccggttggttagccgggatcatgctcgcctgtgccgcgggtccgctgggtagctttgtagtctggcgtcgtatgtcttatttcggtgatacgctggctcatgccagtttacttggcgtcgcgtttggtttgttgctggacgtgaatccattctatgcggtgattgccgttacgctgctgctggcgggcggtctggtatggctggagaagcgtccacagctggcgatcgacacgttattagggattatggcgcacagtgccctgagcctgggcctggtggtcgtgagtctgatgtctaatattcgtgttgatttgatggcttacctgttcggtgatttgctggcagtgacgccagaagatctcatctctattgcgattggcgtggtcatcgtggtggctattttgttctggcaatggcgcaatttgctgagtatgacgataagcccggatctggcgtttgttgatggtgtgaaattacagcgagtgaaattgttgttgatgctggtgacggcattgacgattggtgtagcgatgaaatttgtcggtgcgttgattattactagcttgctgattattcctgctactactgcgcgtcgctttgcccgcacgccggaacagatggctggtgtcgctgttttggtggggatggtggcagtgactggcggtttaaccttttccgcggtttacgatacgccggcgggtccgagcgtggtgctatgtgcggcactgttatttattctcagtatgatgaaaaagcaggccagctaatctatcgctgaacacatttgtcggatgcggcgcgagcgccttatccgacctacggttcggtatctctggtagtcctggtaagacgcgaacagcgtcgcatcaggcatattgccagtgccggatgcggcgcgagcgaccaatccgacttacggcatttctggcggcgttatgccaaagtgattccacgcccgcgtcgtcgccatacgcccacgcggtgtacgctgcaaaaagccttgctgaatcaaataaggttccagcacatcctcaatggtttcacgttcttcgccaatggctgccgccaggttatccagacctacaggtccaccaaagaacttatcgattaccgccagcaacaatttgcggtccatataatcgaaaccttcagcatcgacattcaacatatccagcgcctgagcagcgatatctgcgctgatggtgccatcgtgcttcacttcggcgaaatcacgcactcgacgcagcagacggttggcaatgcgcggcgtaccgcgagcgcgacgagcaacttccagcgcgccgtcatcactcatctcaagccccataaagcgtgcgctgcgactgacgatatattgcagatccggcacctgataaaactccagacgttgcacaataccaaaacggtcgcgcaacggacttgtcaggctacctgcgcgcgtggttgcaccaatcagggtaaacggcggcaaatcaattttaatggagcgtgccgccggaccttcaccaatcatgatatccagttggtagtcttccattgccgggtacagcacttcttcaacaactgggcttagacggtggatctcatcaataaacagcacgtcatgcggttcaaggttagtgagcatcgcagccaaatcgcccgccttttccagcaccggaccagaagtcgtgcgtaaattaacgcccatttcattggcgacaatgttggcaagcgtagttttacccaaccccggaggaccaaaaatcaacaaatgatcgagggcatcgccgcgcagtttcgctgctttgatgaaaatctccatctgactacgaacctgcggctgaccaacatactcttccagtaatttggggcgaatggcgcgatctgctacatcttccggcaaagtggtaccggcagaaatcagacggtctgcttcaatcatcctttacctcataacgcggcgcgtagggcttcgcgaattaaagtttcactgctggcgtcagggcgagcgattttgctcaccatgcggcttgcttcttgtggtttatagcccagcgccaccagcgcggcaaccgcttcttgttcagcatcgtcggtcgccgggctggcaggagacgtgagtaccaggtcggcggctggcgtaaagagatcgccatgcaaacctttaaatcggtctttcatttcaacaatcaagcgttcggcggtttttttgccaatacccggcagtttcaccagtgcccccacttcttcacgctcaacggcattaacgaactgctgcgcactcattccggagaggatcgccagcgccaacttcgggccgacgccgttggttttgatcaactctttgaacaatgtgcgctcttgtttattgttaaaaccgtacagcagttgcgcgtcttcacgcaccacaaagtgggtgaaaacgatcgcttcctgacccgcttcagggagttcataaaaacaggtcatcggcatatgcacttcatagcctacgccgcccacttcaattaacaccagcgggggttgtttttcaatgatgatgcctctgagtctgcctatcacatgacgctcctgcgtaatgaatcaaagataatgctgtatgataaaaaaatgctggatagatatccagcgaaggatgaagaaaacttgcgaggtgtctcgatgaactgaaaaatggcacagtataatttattctacaggttatattggaagcaaatattttaatattacatattcagtgaagaaatgcgtaataaaaatatacattgcgcctcctgaaaaaataaattttttatgctattacgtatatttgtatctatttcaatggaatgacaacgtgaatattaattaccctgctgaatatgaaattggagatatcgtctttacatgtataggtgctgccttatttggtcaaataagtgctgcaagtaattgctggagtaatcacgtcgggatcattatcggtcataacggtgaagacttcctggttgcagaaagccgggttccccttagtaccatcaccacgctatctcgttttattaaacgtagctctaatcaacgctatgctataaagcgattagacgctgggctgacagaacgacaaaaacaacgaattgttgaacaggttccctcccggctacgcaaactttaccacaccggttttaaatacgaatctagccgccagttctgtagtaaatttgtttttgatatttataaagaagcgctatgtattccggtgggtgaaatagagacgtttggagaattgttaaatagcaatccgaatgcaaaactcactttctggaaattctggttcctgggttctattccgtgggagcgtaaaaccgtcacgccagccagtttgtggcatcatccgggtttggtgttgattcatgcggagggagtggaaacgcctcagccggaactgaccgaggcggtataacttaacgcagtcgccctctcgccaggttcagccggctttcgctcatctgcatcgcattctgactaacgtggcagtgggtgatagcaatcgccagcgcatcggcggcatccgcctgtggattagcgggcagtttcagcaaggtgcggaccatatgctgcacctggcttttttcggcactgccaatacctaccaccgtttgctttacctgacgtgccgcgtattcaaatactggcaactcctgattcaccgccgccacaatcgccacgccgcgcgcctggcccagtttcagggcactgtcagcgttctttgccataaagacttgttcaatggcgaaataatcaggctggaactgggtgatgatttccgtcacgcccgcatagatgagtttcagacgagacggtaaatcatccactttggtgtggatgcatccgctacccaggtaggacagttgcctacctacctggcggatgacgccgtagccggtcacgcggctacccggatcaatgccgagaataatagccatcacgcgtctccgttttgctgtttagcaggcctcatcagagagtcgctgcgacctcatcagagatttcaccgttatggtaaacttcctgcacgtcgtcgcaatcttccagcatatcgatcagacgcatcagtttcggtgcggtttctgcatccatatcagctttggtagacgggatcatggaaacttccgcgctgtctgctttcagacctgccgcttccagagcgtcgcgcactttacccatttcttcccatgcagtgtagacatcaatcgcgccgtcatcataggtcacaacgtcttcagcacctgcttccagtgctgcttccatgatggtgtcttcatcgcctttctcgaaggagatcacgccttttttgctgaacagataggcaacggaaccatcagtaccgaggttaccgccacatttgctaaatgcatgacgcacttcagcaacggtacggttgcggttgtcagacagacattcaatcatgattgccgtgccgccaggaccgtaaccttcgtagatgatggtttccatgtttgcatcatcatcaccgcccacaccacgtgcaattgcgcggttcagtgtgtcacgggtcatgttgttagacagtgctttatccaccgccgcacgcagacgcgggttagcgtccggatcgccaccgcccagcttagccgcggttaccagctcacgaatgattttagtgaagattttaccgcgcttagcatcctgcgcagctttacgatgtctggtgttggcccatttactatgacctgccataaaaatatctccagatagccctgcctgttcaggcagcgttaattacaaactgttcaatcgcctgccggttgctccaggacttagtgagcgccgccgcagcaggcgcatcaagccacttgtaagccagatgttcagtgaaaacgatctgccgctcgtgcggaagcgcaagacagaaccaactttccgtattacgcgtcacgcccggcgcatagcgatgacgtaaatgactaaaaatttcaaactctaccgtgcgctgacagtcaattaaggtcagttgttcagcgacaacatcaatggtgacctcttcctttacttcgcgcatggcagcttgcggcgcggtttcaccctcttccacgctgccggttacgctctgccagaaatcgggatcgtcacgccgctgcaacatcagcacccgtttcgtatcttgtgcgtagatgaccactaagatgctaacgggacgcttatacactttatccttcacgctgcctcttcgttgactgccttcgctcatcccattcacatagttatctatgctcatgggagttcactcagttgccgcctcgatgcaacgcgaatgatttcgtgtatttgagtcatatcagttattctcagccttcttcacaacctgaatgctcagctcagccagtgcagtcgggttagcaaagctcggtgcttcagtcatcagacacgctgccgccgtggttttcgggaaggcgataacgtcacggatattgtcggtgccggtcagcagcatggtcagacggtcaagaccgaatgccagacctgcgtgcggcggagtaccgtatttcagagcgtcgagcaggaagccgaatttctcgcgctgttcctcttcgttgatacccagaataccaaacaccgtctgctgcatatcaccattatggatacgtacactaccaccgcccacttcgtaaccattgatgaccatatcgtaagcgttcgccaccgcattttccggtgcagctttcagttctgcagccgtcatatctttcggactggtgaacggatggtgcattgccgtcaggccgccttcaccgtcgtcttcaaacatcgggaagtcgataacccacagcggtgcccatttgctttcgtcggtcagaccaaggtctttacccactttcaggcgcagtgcacccatcgcgtcggcaacaattttcttgttgtcggcaccgaagaaaatcatatcgccatcttgcgcggcagtacgatccaggatgtcttcgatgatttctgcattaaggaacttcgctaccgggctgttgataccttccagacctttcgcgcgttcgttaactttgatgtaagccagacctttcgcgccgtagattttaacgaagttaccgtattcgtcgatctgcttacgggtcaggcttgcgccgcccggaacgcgcagagccgctacgcgacctttcggatcgttcgccggacctgcaaatacagcaaactcaacagatttcagcagatcagcaacgtcagtcagttccatcgggttacgcagatccggtttatcagaaccataacggcgttctgcttccgcaaaggtcattaccgggaaatcgcccagatccacacccttcacttccagccacagatgacgcaccagcgcttccatcacttcacgcacttgcggcgcggtcatgaaagaagtttccacatcgatctgagtaaattcaggctgacggtcagcacgcaggtcttcgtcacggaagcatttaacgatctgatagtaacggtcaaaaccggacatcatcagcagctgtttgaacaactgcggggattgcggcagtgcgtagaatttacctttgtgcacacgagaaggcaccaggtagtcacgcgcgccttccggcgtggctttggtcagcatcggagtttcgatgtcgaggaagccgtggtcatccataaaacggcgcaccaggctggtgattttagcgcgggttttcaggcgctgagccatttccggacgacgcaggtcgaggtagcggtatttcagacgcgcttcttcggtgttgacgtggttagagtcaagcggcagaacatctgcgcggttgatgatagtcaggctggacgccagcacttcgatttcgccggtcgccatatcgcggttaatatttttttcgtcacgcgcacgtacggtgcccgtgacctgaatgcagaactcattacgcagttcagaggccagctttaacgcgtccgcacgatccggatcgaaaaatacctgcacgataccttcgcggtcgcgcatatcgatgaagatcaggctaccaagatcacgacgacggttgacccaaccacacagagtcacctgctgccccacgtgggacaaacggagctgtccacaatattctgtacgcatgagatatcccttaacttagctgccggcggatgccccctgctgcgcaggtgaccaagtcgcagcgttagctgtatgtcacaactgaatgaaaaaaggcggctattatactggaaattctgccgcaccgtaagagcctggcccgcgctggaacgcctcgttaccactttatatcgggcctgaaatcagactctacgccagtttgctataaaggtgttgcccgaactcataaaaattaacaaaatttgtcgttccgccatcggctaatcgcattaaggtgtgaggcacgattttgttttttcaggagtcattatgcttgaacttaatgctaaaaccactgcgctggtggtgatcgatttacaagaaggcatcttaccttttgccggtggtccacatactgccgatgaggtagttaatcgcgccgggaagctggcggcgaaatttcgcgccagcggtcagcccgtgtttctggtgcgcgttggctggtctgccgattacgctgaagcattaaaacagccggtcgatgcgcccagtccggctaaagtgttgcccgaaaattggtggcaacatcctgctgcattaggtgcaaccgacagcgatatcgaaatcatcaaacgtcaatggggtgcgttttacggtacggatctggagttgcaattacgccgccgaggtatcgatacaatagtgttatgtgggatcagcaccaatatcggtgttgaatccaccgcccgcaatgcctgggaacttggctttaatctggtgattgccgaagacgcctgtagtgccgccagcgccgagcagcacaataacagtatcaaccatatctacccgcgcatcgcccgtgtgcgtagcgtggaagagatcctcaacgcgttatgatttacatcggtctaccgcaatggagccatcctaaatgggtgcggttggggatcaccagccttgaagagtatgcccgccactttaactgcgtggagggcaacaccacgctttacgccctgccgaaacccgaggttgtcctgcgctggcgtgagcagaccacagatgacttccgcttctgttttaagtttccggcgaccattagccatcaggcagcattacggcattgcgatgatttagtgactgaatttttgacccgcatgagtccgttggctccgcgcattgggcaatactggctgcaactgcctgccacattcggcccacgggagctgcctgcgctttggcattttctcgattctcttcctggcgaatttaattatggcgtggaagtccgccatccacagtttttcgccaaaggagaagaggaacaaacgcttaatcgcggtttacatcagcgcggcgttaatcgggtgattttagacagccgcccggttcatgcagcacgtccacacagtgaagctattcgcgacgctcaacgaaaaaaacctaaagttccggtacatgctgtactgacggcgacaaatccgctgatccgttttatcggtagtgatgatatgacgcaaaaccgggaattatttcaggtctggttacaaaaattagcgcagtggcatcagaccactacgccttatctttttttacatacgccagacattgcccaggcaccggaactggtacataccctgtgggaagacttacgtaaaacgcttccagagatcggagcagttccggctattccacagcaatcttctcttttctgaatttgccacctatcatagacaggtgccatcggccattttaaagggagtttgtatggtaagcgcgctgtacgccgttttaagtgcgttgttattaatgaagttctcttttgatgtcgttcgcctgcgaatgcagtaccgcgttgcctatggcgacggcggttttagcgaactgcaaagcgctattcgcattcatggtaacgcggtggaatatattcccatcgcgattgtgctgatgctgtttatggaaatgaatggcgcagaaacctggatggtgcatatttgcggcatcgttttgcttgctggtcgtctgatgcattattacggttttcatcaccgtctgttccgctggcgacgttccggcatgagcgccacctggtgtgcgctgttgctgatggtgctggcgaatctttggtatatgccctgggagttggttttctccctgcgttaacgcacaatacgccactttctttttcccggatttttacgttatgtctcaccgcgacacgctattttctgcccctatcgccagactgggcgactggacctttgatgaacgggtagctgaagtcttcccggatatgatccagcgttccgtacccggctattccaatattatttccatgattggtatgttagccgagcgcttcgttcaacctggtacgcaggtttacgatctgggttgtcctctgggcgcggcgacgctcagcgtgcgtcgcaacattcatcatgataattgcaaaattattgccatcgacaactccccggcgatgattgaacgctgccgtcgtcatattgacgcctataaagcccctacgccagtagacgtcattgaaggtgatattcgcgatatcgccattgaaaacgcaagcatggtggtgctgaattttaccctgcaattcctggaaccttccgagcgccaggcgttactggataaaatttatcaagggctgaaccccggcggcgcgctggtgcttagcgaaaaattcagtttcgaagatgccaaagttggtgaactgttgttcaacatgcaccacgactttaaacgtgccaacggttacagcgaactggagatcagccagaagcgcagcatgctggaaaacgtgatgctgaccgattccgtggaaacccataaagcacgcctgcataacgccggttttgagcatagtgagctgtggttccagtgctttaactttggtagtctggtggcattaaaagcagaggacgctgcatgatcgactttggtaacttttattctctgattgccaaaaatcatcttagtcactggctcgaaacgctgcccgcgcagattgctaactggcagcgcgagcagcagcacgggttgtttaagcagtggagtaatgcggtggagtttctacctgaaattaaaccgtatcgtcttgatttattgcatagcgttacggcagaaagcgaagagccactgagcgcagggcaaattaaacgcattgaaacgctgatgcgcaacctgatgccgtggcgcaaagggccgttcagtctgtatggcgtcaacatcgataccgaatggcgttccgactggaaatgggatcgtgttctgccccatctttctgatttaaccggacgcaccattctggatgtcggctgcggcagcggttatcacatgtggcgcatgattggcgcaggcgcgcacctcgcggtggggatcgaccctacgcaactgtttctgtgccagtttgaagcggtgcgtaaactactgggtaatgatcagcgcgcgcatttgttaccgttaggtattgaacaacttccggcactgaaagcctttgataccgtctttagcatgggcgtgctttaccatcgccgtagtccgctggagcatctatggcagttgaaagatcaactggtcaatgaaggtgaactggtgctggaaacgctggttattgatggtgatgagaacacggtgctggtaccaggcgatcgttacgcgcaaatgcgtaatgtctatttcatcccttccgcgctggcgctgaaaaactggctgaagaagtgtggttttgtagatatccgcattgcggatgtgagcgttaccaccacagaagagcagcgacgcaccgaatggatggttaccgaaagcctggccgatttcctcgacccacatgatccgggtaaaacggtggaaggttatccggcacctaaacgcgcggtgctgattgcgcgcaagccgtaaaggtctggtattactgccggatgcggcgtgaacgccttatccggcctacaaaaccttgctaattcaatatattgcagggactatgtaggcctgataagcatagcgcatcaggcagctttacgtttgcataacctcagcgcccgtttccgggcgctattcacgtcttacgcctgaacagctggctgatcaaacgccgttaacttcggtgcattgcccgtatatttttcgatatacaccaacgcactgttaccggcacaggcatttgccagctggctgctggggatatccgccgttaacacgttcgcactgccgtttttacacaagccattttccagatctggccatgcaccttcatgcacgcataccacgccttttttgatcccgtcagtcaccaccgcgcctgtcaaaatctgaccacgtttgttccagacacgcaccagatcgccattcgcaataccaaagcgtgcagcatcttcggtgtgaatagtgattggttcacgatcggcgatcgcatattttttacgcagttccgcatagttaagctgactgtgtaaacggtgtgccggatgtgcggtcagaagctgtaactgcttctcgtcggcggtacctttccattcatcaggagccagccaggttgggtgtgccgggcaatccttatagccaaatttttccaacgttttactatagatttcaattttgccgcttggcgtacccagcgcatttttcaccggatcggcgcggaaatcaccataacgaacgtactgttcgttcttctcgctgtggcgcatttcgatcagtttattttgctgccagaaggcattaaacattggcatagtgacgcgttgcgcacgggcacctttctgagcggcatcatagaaaaatttcagccacgccatttcatctttaccttcggtatagatctcttttccgccaggtttgagtaattccgcaagatcggcaaacacgtcaaaatcgttacgcgcttcaaattgcggagcaacagcctgcttcatcggcacaatatgctggttgctgtaatcaccggtcatcgtcaagtcattgcgctcaaagcttgtggtgatcggtaatacgatatctgcgtgtttggctgctgcggtccagtagcattcagaaacgacgatcatctccggtttctgccatgctttaatcagacgattagtatcctggtgatgggtaaagttaccgccacccgcccaccagatcattttgatattcggatacgtttgttctttaccgttatgctgatatttgccgccaggattttccagcgcatcgacgatacgggcaacaggaatcgccgtcattccgccatcatcagcggcctcgctggcatgtccggcaatcgccgcagacatttccggcagcacgccgccaacacgcgtcgggttgccaccgttggagtaatgataagagaaaccaaaaccgccgcccggtgtaccaatctgccctaacatcgccgccagcgtcaccagcatccagtgtttctgttcaccatattgctggcgctgaattccccagcctgccatcagcattgtgcgattcgccgccatcagttcagcgagtttgactatctgcgcttccggtacgccagtaatttccgccgcccagaccgcgctcttcggcgtattatcgctcttacctgtcagatactcttcaaactgcggatacccggtagtgtatttttcaaggaacactttatcgtgtttgccttgtgtcatcagggtatgcgcaatccctaacatcagtgccacgtcggtgcccatattcggcgcgatccaggtggcattatcgtcaaagaattcgatggtttcggagcggataggatcaatggcaatcactggtttgccagattttttcagctgatggaagtattccagcccttgctcatcggtactgctccaggcaatttttaaggtattcagcgggttcattccccacagcaccacaacctggctgttttccagaatcagcggccaggaggtctgctgttcatacacctctacagaaccgaccacatgcggcatgatcacctgtgctgccccggtactataatcgccgctatgcccggaataaccgcccgccaggttcatataacgttgcagtaaggtttgcgctttatgcaacacgccagaagagcgccagccgtaagatccggcaaaaatggcgcttggtccgttagctttacgaatacgatcatgttgctcatgaatcagttttaatgcctgttcccagctcacctgtacataggtatcttcgccacgacctttcgccggttgcagtggattatcgagatagctttttctcaccatcggatgctgaatacgcgccgtggtgtgtacctgatccgccgccgtagactgtaaggaattcggtatggttttcgccagcgcgcctgtactagaaacaatcttgccgtccttcacttctacgttcatcgctccccaacgtcccgcggtgaggattttaccgcccttctcttctgcccatgcggggagcggtgctgcgcttgtcaccaccagcgctccagcggcaataccgctgtgtttaataaattcacgtcttgttaatgtcataacttcctccctgatcaacgaggatcactgtttctcggtaatatctttggcgttgtactggaaataccgcgttaaaatgtccagttcgttttcgctcatgctggttcgtgcccccattcctttggcaatggacggccacgcattgacggtgtaatggtcggcggcaataggggcatgacaaccagcgcaataggtatcgtcaagtttttcagcgtattgccatagcggtttacggtccgctaatgcgggatcggtaagcgcaccctgtaaagacgcctgacgccattgattgccgtattcgtcagcctgccattccccgtttacagtgagcgccttgataccttcttcacttaatgtggctagcgccagccgttgacctgccgccaggtagagcgtgttttcactgccctgcatttgataaccctgcaacagaacgatcggctgtttgccactggcatcaacgacggtgagatcggttccaggattcacggtagccagctcgcctatgtgagaagttttgaaaggataaatatgtgcgccattagtaacactagtagcggcctgactttccagctcatgcgccgcgttgtcatccatttttatttctggcggaaaatgggcaatgcctttatgacaatcgatacaggtttcgctgtccttttgtgctttgttatgcattttctgcgcagattcactttggctggcaatatccatggcatcaaaagaatggcaactacggcacgttgcagagtcagtggcttttaattctttccatactgtttcggccatttcctggcgatgagcttcgaacttatcgtcactgtctattttgccgctaacaaattcatgataaatatctttagatgcctttaatttagcaaataaataatccatcccactctttggaatatggcaatcggcacattccgcacgtatccctttctggttgctaaagtggacagttccctgatattcctcaaaaggtttactcatgctgtggcaggaaaggcaaaatgctgtatcgctcgttttatgtaagactttttgcgccagcaataacccgccgccaccaaccacaaccgctatcagcaaaaacaataacccaatgcgttttttccctcgcatagattcctctaattaaattactggacaccgaaatcattgtataattaaatatacaacgaattaaccgcttgcataattaggcacaacactgcctgaaacaatcgataaagaatatgatttattacaatgtaatcattaattgctaaggaataacccagttgctatttagaatatatatttatcagttttagtaatttaaatcccataattaatgtgaatatatacaatatttttagcacaacgctatgcgcactgtcacccgctcaacagatcacggttatcgttcgttttttatactgttcagggataaaaaaaggcccctgttgaaattgcaggggcctggtacgagcaagcatcatattgggcgacatgatgcaacggtaaaaatcatttggcctgatggcgttcaatgattcctttcatttcagcaaccgccgccccgtctacgatataacggctatactcgtccgcgtgttcatcactactcatggacaatccttgattacgataacgcatcggactggcttgccacgctcccgcggagctatggacttccagcactccggcatcgaggaagtggtgcaggttttctgcacggactcctgctccggccataatgattggagcatcacgatgggcaataagttccataattttacttaaaccttgcagtgcgtcacttttttgcccacttgtcagtacccgggcaatgcccaattccgcaagattattgagtgtatataaagggttagcgcacatatcgaaggcgcgatgaaaagtcactgccagcggaccggcagcagccattattttttccattcgtggcatatcgacattcccgtcaacatcgagaacgcccgtcaccagtccaggaaaacctaattcgcggaccgtgcgcacatcctcaagaatggcggcaaactcaccgtcgctgtagcaaaaatcaccaccgcgtgggcgaattatcggatgcacagggatcgtcacccgctggcgcacggatttcagtacacccaagctcggcgttaagcccccctcttttggggctgcgcataattcaactctgtctgcgccgttttgctgcgccgttagtgcacattccatgctgtaacagcaaatttccagtaatgccatttttactccttaattacgcgctctgctcgctggcaacgatctcttcaatggaccacggatgaaacttaatagttgttttgccatcggtgaccgccagcgtcggattcggtaatcgctcatgctcaccttttgggctactggttttcacactgatccccggtaggctgagtccttcatcagaaagcaatgccagcgcacgggcattcagcgtttctggatcacccggcagaacgatttcaatatgttcccaaccttcgtgtgggtaacgtttttccccgggccacggtagctccacaatagaaaactgccagtgcgcaacctgtaccggttcatgcaatttaaacagacaaatcggtctgccattgatcatattttcactcaaaagctcgccacactgttcaaacccgcgacgccagcgttcagcagtggcgttttgatggcaacgcaaagaaatgtgatcggcagtcagcggagtgatattcaaccccagacggcgggaaagttcatctaatgcgtggataaatcgcggtaaatcgcttgcaatatcctgcagctcgtcgatagattgccagttcgccataatcactcttcgtctttcagtaaaagcgttaatttaccctgttgccctgtgccaaccaaccgctgatttcacgccgcttctgatgcaatagtgaaaacggcaatacgccacgcgcacgttgctgacgaaaacagccatttgcagtatactcccgccctaatttctttaactggtgcgggcaatttttgctcgcttcatcaatgtaaggtattccggtgaatattcaggctcttctcagtgaaaaagtccgtcaggccatgattgcggcaggcgcgcctgcggattgcgaaccgcaggttcgtcagagtgcaaaagttcagttcggcgactatcaggctaacggcatgatggcagttgctaaaaaactgggtatggcaccgcgacaattagcagagcaggtgctgactcatctggatcttaacggtatcgccagcaaagttgagatcgccggtccaggctttatcaacattttccttgatccggcattcctggctgaacatgttcagcaggcgctggcgtccgatcgtctcggtgttgctacgccagaaaaacagaccattgtggttgactactctgcgccaaacgtggcgaaagagatgcatgtcggtcacctgcgctctaccattattggtgacgcagcagtgcgtactctggagttcctcggtcacaaagtgattcgcgcaaaccacgtcggcgactggggcactcagttcggtatgctgattgcatggctggaaaagcagcagcaggaaaacgccggtgaaatggagctggctgaccttgaaggtttctaccgcgatgcgaaaaagcattacgatgaagatgaagagttcgccgagcgcgcacgtaactacgtggtaaaactgcaaagcggtgacgaatatttccgcgagatgtggcgcaaactggtcgacatcaccatgacgcagaaccagatcacctacgatcgtctcaacgtgacgctgacccgtgatgacgtgatgggcgaaagcctctacaacccgatgctgccaggaattgtggcggatctcaaagccaaaggtctggcagtagaaagcgaaggggcgaccgtcgtattccttgatgagtttaaaaacaaggaaggcgaaccgatgggcgtgatcattcagaagaaagatggcggctatctctacaccaccactgatatcgcctgtgcgaaatatcgttatgaaacactgcatgccgatcgcgtgctgtattacatcgactcccgtcagcatcaacacctgatgcaggcatgggcgatcgtccgtaaagcaggctatgtaccggaatccgtaccgctggaacaccacatgttcggcatgatgctgggtaaagacggcaaaccgttcaaaacccgcgcgggtggtacagtgaaactggccgatctgctggatgaagccctggaacgtgcacgccgtctggtggcagaaaagaacccggatatgccagccgacgagctggaaaaactggctaacgcggttggtattggtgcggtgaaatatgcggatctctccaaaaaccgcaccacggactacatcttcgactgggacaacatgctggcgtttgagggtaataccgcgccatacatgcagtatgcatacacgcgtgtattgtccgtgttccgtaaagcagaaattgacgaagagcaactggctgcagctccggttatcatccgtgaagatcgtgaagcgcaactggcagctcgcctgctgcagtttgaagaaaccctcaccgtggttgcccgtgaaggcacgccgcatgtaatgtgtgcttacctgtacgatctggccggtctgttctctggcttctacgagcactgcccgatcctcagcgcagaaaacgaagaagtgcgtaacagccgtctaaaactggcacaactgacggcgaagacgctgaagctgggtctggatacgctgggtattgagactgtagagcgtatgtaatcgatttttcgtgagagtgaagcctgatcagggttagccgatcaggcttttttattgccatctaaatgtattctgaaaatggacatgccattgttttctcactgttggataagaggccagaagcgtaatatccggccccagggaaacgataacggttgaatttaaggaataccgcagtgtttaaatttcttgtattaacattaggcattatctcttgccaggcttacgcagaagatacggttatagtaaacgaccatgacattagtgccatcaaagattgttggcaaaaaaatagtgatgatgatactgacgttaacgtgatcaaaagttgcctgcgacaagaatacaatctcgtcgatgcgcaattaaataaagcctatggtgaagcttatcgttatatagaacaagtgccacgcacaggtgtaaaaaaacctgataccgaacaacttaacttgcttaaaaaaagtcagcgagcctggctggattttagggacaaagaatgtgaattaatccttagtaatgaggacgttcaggatttaagtgacccttattctgaaagtgaatggctcagttgtatgatcatacagaccaatacgcgaactcgccagttgcagctataccgtaactctgaagatttttatccaagccctttgacaagaggataattcacatctttttggcatgttttgttgcaagctattcctgataaataattgcaacaagacatcgagcctttttcactgagttattaaacatactcgcgagcgcgtcgctacgctagcaagcaaaaatgaaacaggaataatcgaaatgggatgttgcgcacagtcaaaataactcaccgtaaataatcatctgctataaataatcactttcatgcaataccagataagctatttttaaacagacacttaccgcacaacaaactaattaaatacaaagaaaggcaacaatcaacttaatgttaatgaaatgttttacatatattaaccacttgtttaatgcggagaatcagtacactattttcttataattacatttgaaattatatgatcaccgggagtgattgattaattatctttactaataatcagactaatatttacctgtttgaccgagttgggattgcgtcgtttctccattaggagtaaagctttaatgtcacctgaagttcacagaataaggaacaggttatgagctatagcaatattcttgtcgctgttgcggttacaccggaaagtcagcaactgctggcaaaagcggtatctatcgccaggccagtaaagggacacatcagtttaattactctcgcttccgacccggaaatgtacaatcaattagctgcgccgatgcttgaagatttacgcagcgtgatgcatgaagaaacgcaaagctttcttgataagttaattcaggatgcggggtatcccgttgacaagacgtttattgcctacggtgagttaagcgaacatattctggaagtatgtcacaagcatcatttcgatttggtgatttgcggtaatcacaatcacagtttctttagccgagcatcctgcagcgcgaaaagagttattgccagtagtgaggtcgatgtgctgttagttccacttacgggagattaaccgctcttacgcaagctttggaaaggtagcaactttatcgcgctgctggctttccgcgcttcgcggaactatctgctttaggtcgctaatgaagcactcctgccagtggttaatatcgtttttcacgataacgtccagcatttctgcatgacgggaaatacgttccgccaggctcatagtcaatgcacgatccagcgcagctgcaacttcgtcacgatcgtaggggttaacaattaacgcgctcgttaactcgtttgccgctcccgcaaattggctaagaacaagaacgcccggattggctgggtcctgagcagcaacatactcttttgctaccaggttcatcccgtcacgcagtggcgtcactaagcccacgtcagagtagcggaatattttcatcagtaatttacggtcaaaatgctgattcaaataataaagcggcgtccagcctaattgcccgtatttaccattaattcgtccagcttcattttcgagctgatgacgaatatcctgataggcttgcacatcaccacggctcgttggtgcaatctgggtataacgaattttaccatgatgctgcggatatttttccagcaacgcttcataggcgagaaaacgctctggcaaacctttggaataatccagccgttcgacagaaaagatattttgtacgtttttcagttccgctttaagttgcgccagttttggcggcagtggcccggcagcctgtttggctatttctttcggttcaatgccgatcgggtagacttctgttcgaaatgctttgccccaggctgtatggctttttgcgctacgtgtcgtgacgcgggtcaggttagaaagacaatccaggaacgccagacgatcgttttctgtctggaaacccagcaaatcataatcacaaagctgttcaagcaaggtgtcatatgtcggcagcgcgttgaagatttccggtgtcgggaaaggaatatgcagaaagaaaccaatgcgattattcactccccgtttgcgtaattcatgcgcaaatggcaacaggtgataatcgtggatccagataatgtcatcgtcttgcaacagcggcagtaatttatctgccagcaacgcatttacgcgtagatagccgtcccaggcaggacgctgaaattgcaccagatcgagccgataatgaaaagcgggccagagaacggcattggagaattggttgtagtattcgtcaaggtcctgttcgctgaggttaaaagaggcccacgtaatgttaccttttttcaccttttttagcggctgatcctcattccctgtttcaccactccagccaaaccacagtccgcctgcggctttcagtgcccccagtatgccaacggcaaggccaccggcactggcggcgtgctcgtctggtggtgcaatccggttagatactacgactaaacgactcatagtcatcactcctgttatttttacttagatactacgactaaagctctcatagtcatcactcctgttattttctcttttttgttgtaatgcggtggttatcatttcaagccagctccagacatccggcacacccgccagtcgccaacttgcctgagttgcacctgtgccaatttttacactcattccgcccagtcggttaacgactgcgaagccagattcatcggttaaatcatcgcccagaaatacgggcgttcgcccgataaagggagcttcctgcataaaagctgcaattgcctcacctttactggtacctctcggtttgatctcgacaacacactttccctgctgtaacgccatttgtggccagatctgagtaatacgttgcgctaatgtcattaatgcgtcttcatgctgcggagcctgacgataatgcagcgcaaaagccatccctttcgcctccagctccgcgccgggatactgagcgatgactgtatgcagttgcacgctaatatcacgcgcaatcgcatccggcagatgaacgatatgtgttttaccattgatgtcacggcgctccgccccatgcacgcccgctaacgggaagcgataaggttttgccagtgcgtcaagctccaccatactgcgcccacttatcaatgccaatgcaccatcacttgcggttgccagtagctgtagtccttgcagaatattgtcaggcacgacgacctgatcgggatgcggtttgatttccgccagcgttccatcaagatcaaaaaaccaggcatatttcgcggatagttcaggggtttcggttaacggttctgtcacccggttctcctccttctcttttcttattgtgttgcgcagaacgcgctttacagacatgtaagtatagacagtgtgacgggggtcgccatttgcaacgaagaacagccaaccgttatggcggttggctatggtgggaaaaaacgctaaattgttgcagaaaaaagcatcagacagtgcgtttcgctttttgcttgtaacggtcgaagatcaccgctgccagcaggattaagccgcgaaccacgtactgcgcgaaaggagaaatattaagcaggttcatggcgttttccacggtgcctaaaattaagatacccgccaccacataactgatttttccgatgccacctttcagagaaacgccacctaaaacgcaggcggagataacaatcagctcataaccaatgctcgtcattggctgcccactggtcatacgactagccagaataattccggctatcgcacttaccaggccactgagaacaaagataataattttggtgcgaacaaccggtacacccgccagacgcgcggcctcttcgttcccgccaatcgccagggtgttacgaccaaaggtggttttattcagcagcaaaccaaagataatcagacacgcgacggtgagccagattggcgcaggcagaccgaaccagttggcgtaaccaagggcaaagaagctttcatcttcgataccgaccgctttaccgtcactaatgatgtacgccagacctcgaacaatctgcatcgttgccaatgtcgtgatcagagcatttattttcagtttggcgataacaaagccattgaccaggccacagagaacgcccagcaacaaccccgctgccacgccaatccacaggctttcagtcaggttaataaccaccgccgtggtgacacccgcacaggcaattacggaggcgacagaaaggtcaaagtcaccggaagcgaggcagaacaacatgccacaagccaccatcccgctcatggaaattgccaggcccaaccctttcatattaatgaaggtggcaaaatttgggacaaaaatggcacaggcgataaagagcaccgcaaacaccaccagcatgccgtactgatcccagatacgcccgaagctgaaactgctcttaggtgcgccagacccgcttgtagaaacagaagacatcatactctccttactcaggcaacagcctggctgactttaggcatcgcaaggctcagtgcctgacgctcatctgcctgctcgtgtaacaattcaccggcgatttcaccttcccgcatcaccacaatccggtcggcaacgccgaggacttcaggtaagtcgctggaggcaaacagcaccgccacgccctgcgccgccagcgcataaattacgttatatatttcgtgcttagcgccaacatcaatgccgcgcgtaggttcatccagcaaaatgaccttcatctcttcgcttaaccagcggcccagaatggctttttgctgatttccgccactgagattcatgatcagttgctccgcgcccggcgttttgatgttgaggctacgaatgtggtgatcggcattgttttcttcccaaccgttgttgattacacaaccgccgagcacatgtttacgtctggcactgatgttgatattgtcgcgaacggagtgcacgggaataatgccttccgctttgcgatcttccgggcagagcatcatgcctgcggcaatggcgtggctcggtttacgaatatcgatcggctgttggtcgatataaacctgaccggcggtgatttgcgtcccgccaaacatgcctttcattaattcgctacgccccgcccctaccagaccaaacagcccaacaatttcaccactgcgaaccgccagacttattggcgtacgcacgcctggtgctttcacagcatcaagacgtaggcgctcctcgccataactacgcggttgccagccgtagatatcgccaatgtcgcgcccgaccatcgcctgcaccagcgcgtcgtggtcaacctgctacatatcggtaaaggttttgacataacgtccatctttaaagacagtaatggcatcgctgagggcaaatatttcttccatacggtgagaaacgtataagattacccgcccctcttttcgcagttcacgaataacgcggaaaagattgtcgatttcacgggcagagagggagctggttggctcatcaaaggcgataattttggcgttacgcgccagcgctttggcgatttcaaccatctgccactgaccaatggagagatatttcagcggcgtgtccgggtcaatatccataccaagatgtttaagttgtaaacccgcctcataattcagcaaactgcgattcacaatgccgcctttatgcggcagctggccgagatagatgttttccgcgacggtcatttccggcacgagatgcagttcctggtaaataatcgccacgcccgcgttaagtgctgcggtcgtgtcggaaaaggacatttcctgcccattaatcactacagaacccgtggttggcgcatagttgccgctgaggatttttaagagagtactttttcctgcgccattttcacccatcaacgcatgaacctgaccggcatagcagtcaaaactaatatccgtcagcgccttaacgccgggaaacgttttaccgatgccgcgaaaactgagatacggggtagactgttgcataacgtctccgtgaatcactggtcgttcacaccccctctgcatcatgcagaggggaatttttccggcaaattacttaccgcctaaaccttttttctccagttcttctttaaagttgtcacgcgtgatcagtaccacgtcggtaacttcggtaaattttggcggttcaacgtcttttgctacccagttgtaaagcatttcgctggatttatagccatgtacgtccgggcttggcagcagggaaccgtagaagccggttgcctgtgctttagacagttcgctcaccgcatccacaccgttaatgccaatgccgatgatatcggccgctttaaagccctgaccttccgtcgcgcgtacgccgcccagcacggtgctgtcgttcataccgacgatcagccaatgtttaacttccggatgttgaaccagcatactgttggcagcgtcaaatgcccccgggatgtcgttagatttggtaggtacctgataaatttgtttttccgggaatccggccgctttcagcgcatccatagatcccgtagtacggcggcgggcggtatccagttcgttggcggtaatcgccatcaccgcgctttctttgacatcccagccacgtttctgcatctctttatacagttcctggccctgacgttcgccaattttagtcgccgccatcatcaccagcggaacggtatccattggcttacctttggcgttaacaaactggtcatccacggcaatgactttcatatcgtagccacgcgctttcgcgacgatggcagagccgagtttggggtccggagtacaaataacgaaaccttttgcgccactggcagccaggctgtcgatcgcgttcaatgttttttcgccatccggcacggcaatcttaataacctcaaaccctaaatccttcccggctttatcggcaaacttccattcggtctggaaccacggctcttccggttgcttcaccagaaaaccgagcttcaggttctccgccatagcggattgactcataacggctgccagaccaatggctgccagggctttagtaaatttgtgcatggttctctccagctttagtgtcgttttgtgtagggcaaaaacgaatgacattcgttaaattaatcggaaaacaaagcattaccttttaactaaaagataagtgactgtgttgacatagttttagcgagaaattaattctccataggagagcaatatcacatcgcagaattacagtgagaacgtgcataaatttagcgggaaaagacataagggaaagccaatttgtcagacaaattgtcgaatgcacagcagattaatccataagattagcctggaaatccttgttgtctttggtacccatgcgggatgtcttctttttaaccagtcaataggccgcattacctggcgttgagtttttgaaatggtgtaataaccgcaactcaaagatgtggaaaatgcacgtcattcatttcgtcattaattatcactgtgctcattaattaacagaacacgtataatgagagccatctcgcaaaaatgaaaaaacgttttataaaatcatcacttcatcatgaattcaaattcattgattaatatcaacaagatacaaaaagcactatcattaaaattcattgcagttacattgatttcatcaatgaaatgtaaaaatatataaacttgatgatttaagcattttcttatacccgttcagacgttattcttatttcagatcatcgtcagaattgactccacgatcacatttcggaccggcagaaaggaattattctgcaaacagtaattatggtgttttgatttatcttgcacctctccacttctggatataaggatattaggtatggcaaccgctggaatgcttctcaaactcaactctcaaatgaaccgcgagttttacgcatccaatctctaccttcacctgagtaactggtgttctgaacagagtctgaacggcaccgccactttccttcgcgcccaggcacagagtaatgtgacccaaatgatgcgcatgtttaactttatgaagagtgtcggcgctacccccatcgttaaagccattgatgttcccggtgaaaaactgaactctctggaagaactgttccaaaaaacgatggaagaatacgagcaacgttctagtacgttggcacagttagccgatgaagcgaaagaactgaatgatgatagtaccgtcaatttcctgcgcgatctggaaaaagaacagcagcatgatggtctgttgctgcaaaccattcttgatgaagtgcgcagtgcgaaacttgcgggtatgtgccctgtgcagaccgaccaacatgttctgaatgtcgtgagtcaccagctgcattgatcatcatcggcgctaatgcattgcgccgatgaaggttttgagaaaccgctgcctcatctgtttgaagcagcggtttttttaatgggattcaccctgtggggtaaacttgagttcaataagcgcgatggctttttggattgcccgcatggtgaccgggtctgcggcggcgggatggttagtaaagtcgatattcttcagctgactggacattttttcacgaacttcaacgggcgcgattacatcgagaacatccagaatttgtttgataaccaactggcaagcaaccacatcagaaaccaattcctgatcggcattcagcggctgggacatcgtaaactcctgatagcattttgaaagccgttatagtagcgacttcacatcttcagcgatagtcacatccaccgtcatcaggacacaaaaaaacctgccggagcaggttttttgttatcggaacatattgcctggcggtacgtctttgaacgtcttgcaatagttattgaacatacttttcaggattttgcgcagtttcatcgcggcactccgaccatttgttatacaggtgttattgtctttgcgcttataatatgacaaccatcacaaaaatcaatctttatgtgatacaaatcacataaatacccctttaatgttataaaaatgataatcaaaaaacagcccccctatttctgacacctacagatggcaagaaatagcgcctgccaggcgtcttttccggccattgtcgcagcactgtaacgcgtaaaatagtgctttctcttactcttctggctggaccatgagacttctgattctgactcttagtttaataacgctggcggggtgtacggttactcgccaagcccatgtgagcgaagttgacgcggcaacaggtattgtacggttagtttatgaccaggcttttttgcagcatgcccataccgatcgttatgtcagtcgcgggatcgccgatcgcgcatgccagcaggaaggctatacccacgcggtcccctttggtcagccagtaggcaactgtagcctttttgcgggttccttatgtttgaatacggaattcactttgagttatcagtgccatcattccgccttccctgtctttctctaaatattttaatcagcgaggggatcttcgctgattaaagaaatagcggtaatgcgttttattcccattcgtatttttaataattgaagtttatattttaccttttgcaaataataaaataacaaattatagtgacgccacagcaacaaatataacctttgtggagcactatcatgctgaaaccagaaatgattgaaaaacttaatgagcagatgaacctggaactgtactctagtctgctttatcagcaaatgagcgcctggtgcagctatcataccttcgaaggtgctgccgcgttcctgcgccgtcacgcccaggaagagatgacgcatatgcagcgtctgtttgattacctgactgataccggcaatttaccgcgtattaataccgttgaatctccgtttgctgaatattccagtcttgatgaattattccaggaaacctataaacacgaacaattaatcacccagaaaattaacgaactggctcatgctgcaatgaccaatcaggactacccaacatttaatttcctgcaatggtatgtttctgagcagcatgaagaagagaaactgttcaaaagcattattgataaattaagcctggcaggcaaaagcggcgaaggtctgtattttatcgacaaagaactctctaccctcgacacacaaaactaatgctctccggcggcaggtttactgccgccgtttcaaatcagtgacggcaaatcttactctgatcggtgctaaaaccgtctttgctaggtataaatttgccttttgctgccagaaacgctaccagctctcccgctgtcatcccttctgcgctgcaggtgtgaaaacgtgcctgttcaccaaaacgcgctttaatcgcagcttccagactggcatgcgtatattgctcgccactttcaatcatcatatttaacacttcatgaccgtgaatagagtccatcgtccctcctcaaaaaaagcctagcgtagcgattgccgcttatgaagactttgcgccagcgcaggactgaatgctttttattgtacatttatatttacaccatatgtaacgtcggtttgacgaagcagccgttatgccttaacctgcgccgcagatatcactcataaagatcgtcaggacagaagaaagcgtgaaaaacagaaccctgggaagtgtttttatcgtggcgggaaccacaattggcgcaggcatgctggcaatgccgctggctgcggccggtgttggttttagcgttacgttaatcttgttgattgggctttgggcgttgatgtgctacacggcgctattactgctggaggtgtaccagcatgttccggcagataccggtctgggcacgctggcaaaacgctatctgggacgctacggtcaatggctgacgggcttcagtatgatgttcttaatgtatgctctgactgcggcatacatcagcggtgccggtgaattgttggcctccagcatcagcgactggacaggtatttctatgagcgcaaccgctggcgtgctgttgttcacttttgttgccggtggcgtggtttgtgtcggaactagtctggtcgatttatttaaccgttttctgttcagcgccaagattatttttctggtggtaatgctggtactactgctgccgcatattcacaaagtgaatcttttaaccctgccgttgcaacaggggctggctctgtctgcaatcccggtgatttttacgagctttggttttcacggtagcgtgccgagtattgtcagctatatggatggcaacattcgtaagctacgctgggtgtttataatcggtagtgcgatccccctggtggcatatattttctggcaggtggcgacgcttggcagcattgatagtacaacctttatgggattgctggctaatcatgctggattaaacgggctgttacaggcgttacgcgaaatggtggcctctccgcatgttgagctggcagtgcatttatttgctgatttagccctcgccacgagttttctcggcgttgcgttaggcttatttgattatctggctgatttatttcagcgtagtaataccgttggtggacggttgcaaactggtgcaattacgtttctgccgccgttggcgtttgcactgttttatccacgaggatttgtgatggcgctgggttacgccggtgtggcgctggcggtactggcattgattatccctagcctgttgacctggcaaagcagaaagcacaatcctcaggcgggttaccgggtcaaaggtggtcgtccggcgctggtggtggtgtttctctgtggtattgctgtgattggcgtgcaatttttgattgcggcagggttgttaccagaagtggggtgatcagatagcctcaaattccttattgggtgccagaattaacgctgacacccaatttggcctcttaatgcaggcagcactgcttaaatttcttaccactaccgcacgggcaaggatcgttacgccccggtttctcttctgctttgatcggttgctgaacagctttttcctgcggatgcgccatccagtacgcatgtagatcaagcgccgccagtcgaatggcatctacgctctcttcaaacgcttctgggctcatcttttctacccgctcgaagttttcctcagtaccgtgcagcgcaatcgcctccagcgctggttttaagctatcgggcaacgtactccagtcagaaagtgccacgccccgcatatagccaaagcaccactcctcaacaatcgtcagctcgctgccatcaacttctcgcaagccgaataacggctcaaactgctccgggaattcgttcagacgctctgcggtatcggccatatgttgaaaagccagattcataaagcgcgtcatctctttctcactcgcccagcgcggcacatagtcagccccaccccacacggcaaccagccactgttccggttcaatctcttgcggagaactcaacaccgccgtcaataaaccgtccagctccgccacatcaaggatggcgtggtcagtgttgtatttggtcagaatatcgtccagccattccaactcactttcgtttaacggtcccgttttcatacgcttttccttgtggatctcaactcgccagcacctatcttacatgccggtccgtatcagagatactttttgagtggctttgctggtgattaaaaattaaggagggtgtaacgacaagttgcaggcacaaaaaaaccacccgaaggtggtttcacgacactgcttattgctttgattttattcttatctttcccatggtacccggagcgggacttgaacccgcacagcgcgaacgccgagggattttaaatcccttgtgtctaccgattccaccatccgggctcgggaagaaagtggaggcgcgttccggagtcgaaccggactagacggatttgcaatccgctacataaccgctttgttaacgcgccaaattcttcaggcctttcagccagacatccgcttgacgccgatgtcttttaaactggagcgggaaacgagactcgaactcgcgaccccgaccttggcaaggtcgtgctctaccaactgagctattcccgcattcatcaagcaatcagttaatcacttgattttattatcgtctggcaatcagtgccgccgttcgatgcgttgcattctacttacctggcgcgatgagtcaacgatatttttcaccacttttgatcgtttgctgaaaattacgccgaaacgatcactgatcaagcaaatctgcacgcgcagcgctcaaatattgcaacatactccacagagtcagtaccgcagccacaaagaaaagtgcaataccggcgtactcaacccaaatgttcggacgccacagcagccatgccaacgccaccatctgggcagtggttttcactttcccaatccaggagacggccacgctactgcgtttacccaactccgccatccattcgcgtagcgcagaaataataatttcacgggcgatcatcgttgccgccggtaatgtcacccaccagctgtgataatgctcggttaccagcaccatggcgatagccacgagaactttatctgccacagggtcaaggaaagcaccaaaccgggtactctggttccagcggcgtgccagaaaaccatcgaaccagtcagtcaccgccgcgacgcagaaaatgagcgcggcggcaaacgggctccaggtgacaggcagataaaagaccaatacaaagaatgggataaggatgacacggaacagtgtaagcaacgtagggatattaaattgcataatgacgggtaactatctgttgtcagtaagattacccctatgttgctacagagacatcaatgtttcaagctccagaagatcttttctgccagaccttggctaatacccggcacttttgcaatttcctcgacgctggcgttacgtaaaccttgcaaaccgcccatatatttcaacaacatttgccgacgttttggcccgacgccttcaatggtttccagggaactggtatttttgaccttcgcccgttttttacggtgcccgccaatcgcgtgatcatgactttcatcgcgaatatgctggataacatgcagcgcgggactatctggcggcaaactaaatccctcaccttccggctcaaagaacagcgtttccagtccagccttacgatctgctcctttggcaacgccaagtagcagcggatgatttttatcccaactgacatccagttcggcgaagacatttttcgcctgcgcaagctggcctttgccgccgtcgataaggatcacatccgggatcttactgtcgtcaatggctttaccataacgccgacgcagcacctgattcatcgccgcataatcatcgcccggcgtgatgcctgtaatgttatagcgccgatactccgcacgcagcgggccgttagcatcaaacaccacacaggaagcgacggtttgttcgcccatggtatggctgatgtcaaagcactccatccgcttcacttccggcaatttcaacacgctggcaagcgcggtcagtcgctggtgaacggtagattgctggctaagtttgctggttaaggccgtcgccgcattggtgcgcgcgagtttcagataacgcgccctatcgccgcgaggtttggtttgaacattaatcttgcgtcccgccagttcactaagggaatcggcgagcagcgttttatcgctaagattaaaatcgagcaggatctcacccggtaaggtgcgcatctggctgccttgtaaatagaactggcctacgaaggtttctaccacctcgctcagttccgtaccgccaggcactttcgggaaatagctgcggctgccgagcactttgccctgacgaatgaacaatacgtggacacaagccatgcccgcatcgaacgccacaccaataacgtcgaggtcgtcgccggtattggaaacgaattgtttttcggtgacgcgtcgcaccgcctgaatttggtcgcgaatacgtgcagcttcttcaaactccagattctggctggcagtttccatacgactaatgagttgcgtaagcacctgatcatctttgccagacaaaaacaggcgcacatactcgacctgctgagcgtattcttcttcactcaccagtccttcaacgcacggtcccagacagcgccctatctggtattgcagacacggacggctgcgattgcgataaacactattttcgcactggcgaatggggaaaatcttttgcagtagcgccagtgtttcacgtacggcatagccattcgggaacgggccgaaatattcacctttggcatgcttcgcaccacgatgcatcgccagacgcgggtgggtatcaccactcaggaagataaaaggataacttttatcatcgcgtagcaaaacgttgtaacgcggctgatagagtttgatgtagttgtgttccagcaacagcgcttcggtttctgtgtgagtaaccgttacatcaatttgctggatctgggcgaccagcgcttcggttttgcggctagcgaggttgctacggaaatagctggaaagccgttttttcaggtctttcgctttgccgacatagataaccgtaccaccagcatcgtacatgcgataaacgcctggctggctggttacggtttttaaaaacgcttttgcgtcaaactgatcactcactgactacttaatgtctccgcattacacagaccatggcgaattgccaggtgagtcagctcaacatcgccatgaatgtttagtttactgaacatacgatagcggtagctgttcaccgttttcggactgagattgagctgttcactgatctcattgaccttctggcccttggtgatcatcagcataatctgcaattcacgttcagacaaactggcaaatgggctttctgttttttctggttcgatctggcttaacgccatttgttgagcgatgtcagaagcaatgtaacgctgcccactatagacagaacgaatcgcactcacgacttcctgcggagccgcgcctttgctgaggtagcccgcagcaccggcctgcatgactttcgctggtaaagggttttctgtatggacggtaagcatgatgattttgacatcagctgtggaacgcgcgattttacgcgtcgcctcaagaccgccaatgcccggcatactcatgtccattagcaccacgtcaacggcatttgtccggcaccacttaacggcgtcttcaccgcagcttgcctcaccgacgacttttataccctttatatcttccagaatgcgtcgtatccctgcgcgcaccagttcgtggtcatcaacaagtagaacgttgatcaaaggaatatctccagaaatagggataacgctactgatagttagtcattcgtatattagcggtttttattgcaactttgaaacgttaaaaatggtgggtattcgatttttctctcgtttttgtcaattcgattgtccacagttatggtcacgcccgtcaccaacggcttaccggatcgtttcacagtaagccctacgatgaaatgtgacaaaaattgactttattcagcaaaaatgaaaatcagcccgctgaatatgtaacattaattaacccgaacaatacgggcaaaaaacattcatgataaaaatatttattggtcattatattaacgtattttatagcactgccgatatcacgctcaaaaaacaaccactgctatttttagcaaagcttatggtatactccgccgccttaacatttttcaccgcaaattttcattgcaacatgacgaggaaaataaatgagtacgcctgatttttctactgccgagaataatcaagaactggcaaatgaagtctcctgcctgaaagcgatgctgacgctgatgctgcaggcgatgggacaagctgacgcgggccgcgtgatgttaaagatggaaaaacagcttgcgctgatcgaagacgaaacccaggctgcagtattttccaaaacggttaagcaaattaaacaagcctaccgtcagtaatataaaaccggctgatagcgtgcctttcagccggtttttgcatctggcacgcaggacagaaaagagatcaaattaagccagtagcggccgcgtaacaggcaacctgggtcttatttggtgcattaatttttttctgcatgtttttctggtggaaattgaccgtattctcagagatactcaaaatcatcgctatctctgcacttgttttcccttccgccgtccacctcagaatttctttttcgcgcttgctgaaattcatctctggcgtcatcactatttcatcatttaaacgcatcagagccatcagactttcgcgcaccagtaactgcatttttaattgcagttcatcactaagaatgggtatttcgcgcgcgctgcaacgggaaaaggacaaaaagcccagcgcccggtttggcagcattaaatactgagtgacaccgcggcgtaaaccatgtgcgcgcgcggcttcccataacggctgtgcttcgctgaataagtcatcattccacattaaatggccctgactaaagttttcagggttcagcaccggatcaattgcgagaaagttttttgcctgataataactaacccacgcctcagggtaattggtgtaaaaagccactttaggtcgagtgaatggtaccgggtggcggacacataagctatagtaatcgtactccagctgctgagcctgaagctcaatttcatggtagacctcttctgcggtctccatcctctgaaaacgcaacagcatcgtgcgacgccagctgaaaaaatccttatcctgcatagtaaaccgcaacgcccttgagagtgagtatcatttataatgataattcaaactatcacataaataagatttatatataatttatattattcaggcaatgaattacttttgcaagccatcgcattctcttatgttattaatgagttatgctgatttgttaagcagttttatcaggcttgaaatggcgtccagccccgacaggtgaatcgtcggggctgattttttcttattattgcagcagaaacttctcgaggaactggcgggtgcgaggctgctcggttccgtaacgtttatcatgttatcctaaggattatccgaaaaataatacctacgaacatcttccaggatactcctgcagcgaaatatttgttttaagctcactcacatatcgcaacatttactttactttaagacaattccaggcaaattatacaacactttacgggatagtaagtccgcctgaaaaatcgcgagagtggcgcattaggtgacccatgttgttccgtttagtcatgatgaaatattcaggtaaggggaattatcgttacgcattgagtgagggtatgccatgagtacgattattatggatttatgtagttacacccgactaggtttaaccgggtatctgttgagtagaggggttaaaaaaagagaaatcaacgacattgaaaccgttgatgaccttgccatagcttgtgatagtcagcgccctagtgtggtgtttattaatgaggactgtttcatccacgatgcttctaacagtcagcgtatcaagctcatcattaatcaacatcccaatacgttatttatcgtttttatggcaattgccaatgttcattttgatgaatatctattggtcagaaaaaatttattgatcagttctaaaagcattaaaccggaatctctcgacgatatccttggcgatattctgaaaaaagagacaacgataaccagctttttaaatatgccgacgttaagtttgagccgaaccgaaagcagtatgttgcgaatgtggatggcaggtcagggaaccattcaaatctctgaccaaatgaatatcaaagccaagaccgttagtagccataaaggtaatattaaacgtaagatcaaaacgcataataaacaggttatctaccatgtcgtccgactgacggataatgtgactaatggtatttttgtcaacatgcgctaacacattctgactggtggtttcccaccagtcaggctgaataagattactctgctttctccacaaagataccgtcctgatgccctgcttcattaaagaaccagatgccgagcgggtagtcttccaggctaaccaggtacattgtgccttcactaaactcctcaactgccagtaccacgccaggacgacgcggaccgccatccgttttgactgttacccgatcattcaccttcatcgttttcctcctgtggctttgtgccagtgtagaacaatttcgtttttctggcagcgccaggcgcgcgcgagtgctgattttctcgacggtctatacttaagagatgccaggcggacttaacgactggcggcaacaacagagtaacggttgcgaggaaagatgatgaaaaccgcaaaagagtacagcgataccgcaaaacgtgaggtcagcgtcgatgtcgatgccctgctggcggcgatcaatgaaattagcgaaagcgaagttcatcgcagccagaacgattctgaacacgttagcgtcgatggacgtgaatatcatacatggcgtgaattggcggatgccttcgaactggatattcatgacttcagcgtctctgaagtgaatcgttgaatgcacaataaaaaaatcccgaccctgagggggtcgggatgaaacttgcttaagcaagaagcacttaaaaaattcgttacaccaggaaatctgatgtgttcatcaccttatccgcaatttttttcgctgacaagaaaatattcgccatatgaatgattaacgctacttatgaatagaaatgtgacgcacgtcaccccttggtggctctggcgtcagcgggatcgctcccgaaaaaatcatctttgataatttgtgcggttttgagaatcatcctggtaagaggagtactgcgcgactatgtttagtattcaacaaccactactggtttttagcgatcttgatggcaccctgctggacagtcatagttatgactggcaaccggcagccccctggctcacccgtttacgcgaagcaaatgttcccgtcattctctgtagcagtaaaacaagtgcggaaatgctgtacttgcaaaaaacgttggggctacaaggtttaccgctgattgccgaaaatggcgcagtgatccagcttgctgagcaatggcaggagatagacggttttccacgcatcatcagtggtattagccatggcgaaatcagcctggttttaaatacgctacgcgagaaagaacattttaaattcacgacttttgatgatgtcgacgatgcaaccatcgccgaatggacgggattaagccgtagccaggcggcgctgacgcagcttcatgaggcgagcgtaacgctaatctggcgcgacagtgacgagcgtatggcacaatttaccgctcgtctgaacgaactgggcttacagtttatgcagggtgcgcgcttctggcacgtactggatgcttctgccggaaaagatcaggctgccaactggattatcgcgacctatcaacaattgagtggcaaacgcccaaccacacttggcctgggcgatgggccaaacgatgcgcccttactggaggtaatggattacgcggtgattgtgaaagggctaaatcgtgaaggggtgcatctgcatgatgaggatccggcccgcgtctggcgaacgcagcgtgaaggaccggaaggatggcgtgaagggctggaccattttttctccgcccgttaagcgttatcgctcgcgaatacccgattacgcccagcctgtttagcgagataaagccgacggtcggccagactctggagttgttcaaaatcataatcaccggtttcctcgctgctgcttacccccaggctggcactgatgcgtatcgtcgtactcttggcgatcaacatctctttttcatttaatttcagtcgaatacgttctgcgacctccgcagcctccgtcagactcgcgcctggcagaatcacacaaaactcctcaccaccgacccgcccggcaacgtcctgcgcacgcaaggaactgctaattaatccggcagcatgagaaagaacacggtcgcccgcctgatgaccaaagcggtcattaatcgctttaaaatggtcaagatcgacctgaatgacagaaaaaggatgttggtgcgtctgacacaatttagcgagcggacgggctttttcgaacagtgcgccacggttatataaacgcgttaaggtgtcgtgccacgcctgccactgcaagctgctttgcagaacatacatgttgctaaccatccggcgaatcacataccaggagatgagtaacatggtggtaaagagcgcccacagcagggttaatgcaatgctgatactgccgaaatcgccgcgcacgccttcgcttaacgtatggacacgcaccagcacaccgtcgaaatggtccagacgttcccagctaacatagcgactgtccatacgaatgccgccccgcgtgtcatgttccattgcctgcgccagcaaggccagttcacgaggatcaaaaatattccctgttggatggtcaggattggaagaggtcaaaaatctcagcttactgtcatagagctgatactcaccatcgaggtttttatcgatggcgtttcttaaaaattgctgcatagtacgcacgggaatactcatccccagcacgccataccagtagttattactgtctaccggaacactgacggtaacctgcggttcagtattgctggcgtgttccggttggctagtgaaccagcgtaccgcgcggtgacgattttctcgttgactatggccaataaaccagggttgggtgacatagccgtaataacgcgttggaacattgcgcgtaaacaaggtcggctgcgtgctaacgtaaaatccggcacggctgacatacatcgcctgttcaaccatgctgctggagttgtgcgctagtcgcagcaagtaaccaacttccagtgcagcggtaatttcattgtcgaggctttcattttcgcgagacaggagattcccctcgctgactaatgcatcgctcacaccattaactggcagagtgcgtcgtcggttgagttcgattttccaggcgtgctcgtcgcgatgctgttcgaactcggttacagcatcacgcagagaggtgaaatccagtggcgctacgagagcttcgcgcatgccattacgtaaaaagatcagtttgtcgacgttatactgcaaatgcttatcgagcgcgttggcaacgttttccagatgattacgctggctggagatataggcatcttccagcaccaccacttcacgccaggtgagcaaggtggaaaaaagcaataccacgataaagcagagattaacgacatgaccaggccccaggcggcgtgcgagttttttcaaccagctctggttttccatttttgtctcgtgctgcaccctgacgactcccaacctgcttttttatgattctggcataacctggcgatagcgtaccgcaaaacagcgataattttataatggtggcatgataagacgcgactatcattcattgcaggcattagcacaccaggccggatgtgatccggcctgatgttaatgataccctttcacacttcttccgcagaacgactcccctcccccggaacaagctcggtttcatgaaaagcttcccgcttgaccccgtaaccgtcataccaacgacactcaaccataccgctggagtatccagtgacaatcatccgcgggccgccctctttaaccgtaacttcctcactaaccataaagctcatactcgcctccttttttcgagtgaaacttgttcaccttagttgaagatggcgaattttgcataatagccagtgcgagtattaatgtgcctgaccgcgcattttctctacggctttcactcccagcaccacgatgccgccgatgataaatccaagaatcagatttaaaacagtcggtaatatcatcgccactactgcactttgctgcccggcgaaatgttcaatggcgtgatgcagcggcgcaattccatgtaccacaatcccaccgccgacgaggaacatcgccagcgtgccgacaatgcttaacgctttcatcagccagggcgcgataatcaataaccctttacctaatgcctgcatcagcgcgctggatttttccgccagccaataccccaggtcatcaatcttaacgataacccctaccagaccgtagacgcccacggtcactaccagcgcgatgccactaagcaccagcacctgattaagcaacggcgcttcggccacaatccccagcgtgatggcgacgatttccgcagacaatataaaatcggtacgaatcgccccttttattttgtccttttcaaacttcagcggatcctgcgccgccagcttctccagacgctgctggctctgcgccggatcttctttatgtttacgcgcctccagcatatgcagcactttctctactccttcaaagcagagaaacgcgccaccaatcatcaacagaggcgtaatcgcccacgggataaacgcactgatgatcagcgccagcggcaccagaatcactttattaatcaggcttcctttcgccacgccccagaccacgggaagttcccggttggcccgcacgccactaacttgttgcgcattgaggcttaagtcatcccctaatacaccggcggttttcttcgccgccagtttgcccatcacggagatatcgtccagtagtgtggcgatatcatcgagcaacgtcagtaaactactcccggccaaaagcattccctctcatttttattgttgaagggtgtaagtatgaagcaaaaacggcagctctgatacttgcttcacaggtcaacatttttttaacaatcaagtgcaattatatctctcgccagcagaatgattttcacgtttactatgaaccacctttttatttccaccgtgagggattatgcgtttccgccagttgttaccgctttttggcgcgctgtttgcgttgtatatcatttggggcagtacctattttgtcattcggattggcgtggaaagctggcctccgttaatgatggcgggcgttcgattcctggcagccggtattttattgctggcatttttgctactgcgcggacacaaactccccccgctacgtccgctgctcaatgccgcgctgattggcctgttattgctggctgtcggtaatggcatggtgacggttgccgaacatcaaaatgttccttccggcatcgccgccgtagtggttgcaaccgtgcccctctttaccctgtgcttcagccgcctgtttggcattaaaacgcgcaaactggaatgggtgggtattgccattgggcttgccggaatcatcatgctcaatagcggtggaaatttaagcggcaatccgtggggcgcgattctgattttaatcggcagcattagctgggcgtttggcagtgtttatggcagccgcattaccttacctgtagggatgatggcgggtgcgattgagatgctggcggcaggcgtggtgttaatgatcgcgagcatgattgcgggtgaaaaactgacggcgctcccttcccttagtggcttccttgcggtcggctatctggcgctgtttggtagcattatcgccatcaacgcttatatgtatttaatccgtaatgtcagtccggctctcgccaccagctacgcttacgttaacccggtggtcgcggtcttgctgggtacgggactgggtggagaaacactgagcaagattgaatggctggcgctcggcgtaattgtcttcgcggtggtactggtcacgttgggaaaatatctcttcccggcaaaacccgtagttgcgccagttattcaggacgcaagtagcgagtaatcaagcgagtaaatgaatcccctgcgtgtcgatctgcgcgctggcaccttcgccgcagatccactcttccagacgctcggtaagcgcttcatccgtcagcttctcgcgcccacgtaacgcgcactcccagacaatcaatacgcgccagccgagttcctgcaagcgactgatatcgcggcgatcgcgctcaacatttttacctatcttctccagccagaactcggttcgagtcgcaggcactttaaacagatagcagtgatgatgatgccagaagcagccatgggtaaatatcacgcagcgatattcatcaacgacaaaatccggacgtccgggcagactggcgtcctgaacgcgaaatgccaggccctgcccggttaacagactggcgaggcgcttctctatcgccgtatcacgcgtggcaatcgcgcgcatatttttgctgcgagtggccttatcgtgaacgtcggccatgttgtgcctcttgctgacgcttagttatcgactacgtcggccatgttgtgcctcttgctgacgcaacgccaccgcctgtttgatttttggctcaagcagttttgccaccgcggcaaagaccggcacgaccacgctgttaccgaactggcgataggcctgagtgtcgctaaccggaatacggaatttcgcttctcccggcgcttcaaaacccattaagcgcgcgcattcccgaggcgttaaccgacgtggacgatgttgctgattcagcggatcgtcaaagtctttctcacccgtggccatatcccagccgcgatcgattaaaatttccgcgccatctttgtaataacgcgcagacagcgtacgcgtgacgctttgcggattgttcggataaaccattccataaccgaagccgttaccgcgcgcctgatgttttttcgcatatcgatagaggtacttccacagcaccggcgtcaggatatatttcgcctcgaccatcgggtccaacagctgcgccagcgtcactcgctgcgcagggaaacattcgctgatatcacgcagggtaaaatcggctttcagattcagatcgcgacgaaaacccaccagcacgatgcgttcacggtgctgcggcagaaaatgtttgccgtcgatgattttcggatcgtctggcccattatcttctgcatcagccacgtcatagcccagttcgtccagcgtctgcatgatgatgcggaacgttttaccctggtcgtgacttttcaggtttttgacgttttcgagcacaaacatcgccggacgacgcgcgtcgataatgcgtaccacatcaaaaaacagcgtgccctgggtatcgcaggcaaaaccgtgcgcccgcccgaggctgttctttttgcttacgccagccaggctaaatggctgacaagggaaaccggccagtaaaacatcgtgttcaggaatgtgttgacgaatatgttccgccgccgcctcatcactcacgccttctttatggctgagggtgatgtcgcggatatcttcattaaaatgatgcgtcgccggatcgcaataatggttggctttataagtgcgtaccgcatgtttgttccattcgctggtaaacacgcactgtccgccaatgctttcaaaaccgcgacggatgccgccaattccggcgaatagatcgataaagcgaaacgcataatgcggatgatgtgccggtggtttgggtaataacgtttgcagatgggcgaactctttctcacttaaacggtgccatgcgctgtcattcgccagcgcacgttttaaaattgccgcgctccagtgattctcacctacaccattaagctgcgccaccaacgttttaacatcataaatttgcagcagtttctccagcattgcctgtgcggcattcccggtgctgtaactatcggttacacttatattttcctgcatagatttcaccggccatctgagatggccgacaggttaacataattacagccatttagggccacgcgctcagccagcggaactaaacgcatctatcaccttgtgatcgacaccttcattctcccccgccagttcggcactgagcttcgccataaactcgactaaaaaatgcgcgttgtgctgcgccagctgcttgcctcttgcggtttgcatggtttgcggtagcttcagcaacttagtctggaaatgatccagcgcgtagcgtttatcatcaagcgggcgatgctgtgcgaacggatcttcaccatcaaacagcgccacgcccaatgccccactaacggcaaacacgcgcgccaggccaatcgcccccagggcttccagccgatccgcatcctggacaattttagcttccgttgttaagggggcgatttgcgcgctgaaactgtgagcggcaatggcatgacaaacggcctcgattttctccgccggaaattgctcgaactcttcacggagcaggcgacgcgtctcttctgccgccaggatactagaacgctgcctttgcggatgatttttcgccaggctcacaatatcgtgaaaataacaggcggttaaaatcaccagcatatcgacatcgtcatctgccgccagcttctgtgccgtagcccagacgcggcgaaaatgacacacgtcatgggccgcgtcctggtgctgatgatggtttttcaaccagttttcgaactgtgcctgccagtgttgtaagtccatacgcgctccgttgccaaagagtcgccaccttagcagtttttattcatagcgtctgctacgtgcgggacgaggtcgggtgtaccaggcaatgctgcctaacaatgccccgaccagagccataaataaaaatccgaccagtgcccctaaccactttcccgcggtagagcctaaatcgctttcaaatccgctcacgggggcatcgggaatccggctcatcacccagatgtaacgcgccattgcccagacgaaatagccacaccatgtatagaaagcccacaaagccagtttgccgccagggctgcgagagagtctctcttccatctttgtgctaccgtattccattttgagataacccggaaaattcagacttagtactattatgtgataaaagtcacatttttccacattggatgagccagtcaagactcaatcattttttgaacaaatagataaattttgcgcaacggcagtgaatacaggaaaaatcgttttgagcgattttatttatctttgatatcggctttattaattcatttaatcaatatattagcactgattacaattatacctttttattattctgtgtcatgatgcttccgttattagccttttatcgtcttgtttatattttttgggccggcatgatgccggctttttttatgccttcattaatgtgcgcctgatcacaccagccgtttggcgcaacaatcattgataccccctatgtttccgctcaactcataacatattgatatacatttataattttcatgaatatttatatttagaattcataattatgaattatattaaatagattagaaacattttgatatcttttaaatacatttgttacatgtaatccttaaaataaaatgaacttcatagaatagtatccaaatgtgctttttttggataacggcacttattgatatattcatgaagattataatcacaagggaatacataatgaaaagaaaagttctggcaatgctggtcccggcgttattagttgctggcgcagcaaatgcggctgaagtctataataaagatggtaataaactggatttgtacggaaaagtagtgggtctgcactacttctctgatgattctggcagcgatggcgacatgtcatatgcccgtatcggtttcaaaggtgaaactcagatcgctgatcaattcactggttatggtcagtgggaatttaacattggcgcaaacggtcctgaaagcgacaagggtaataccgcaacgcgtctggcatttgcaggtttaggctttggtcagaatggtactttcgactatggtcgtaactacggtgtcgtatatgacgtagaagcatggaccgatatgctgccagaatttggtggcgatacctatgctggcgctgacaacttcatgaacggtcgtgctaatggtgttgcaacctaccgtaacaatggcttctttggttaggtcgatggcttgaactttgctttgcaatatcagggtaataatgaaagtggtggaccattcgggcaggaaggttccggtagtggtgatggccgtagcctttccaaagaaaatggtgatggtttcggtatgtcaacatcctacgacttcgacttcggtttaagtctgggtgctgcatatcaaactctgatcgttcagatcgtcaggttggagttggtttaaatgatcgtaaccatagcaacagaaatgctggtggtgaaaccgctgaagcatggactgttggtgcaaaatatgatgctaataatgtgtatttagcagctatgtacgctgaaactcgcaatatgaccccatatggtggtggcgagtttgataatggtgaatcaagatcagccatcgctaacaaaacccaaaactttgaagttgttgctcagtatcagttcgactttggcctgcgcccgtccatcgcttacctgcaatctaaaggtaaggatttaggcggttgggctcatgacggcaacggcgacccacgttacaccaataaagatctggttaaatacgttgatattggtgcgacctactacttcaacaaaaacatgtccacctatgttgattacaaaatcaacctgctggacaacgacgatgacttctacgaagcaaacggcatcgctaccgatgatatcgttgctgtgggcttagtctaccagttctaatcagtcaactcgctgcggcgtgttactgtaaaactgaacactagcctgagttcgtccctcatcgaactcaggcttttttattggcatttcatctccatctgcggcacacgcaattgccgaagcatatcgatacagcaccttaccctgcccctcctggcacaataacatcaaccagctactcttcaagctaacacccaaatgcatttctttatgaattaatccgtaacaaacacgcttcccatatagaaatatttgcaaaaatagtgcatgaaataagctttttctctaccaatccgggatataaatattcatcagcaccacaatattccacagcactaaatctctccccgccaccccgtacctctgataatggtctaaaatcattgaagccacttgcgacgacgttgctcaataaggaaaatttggcgtgaataatattcaacaccagtgcagcatcatcattacatacttacagccgccgactaccgctttcgatatattgactcaattttccagcctggttaaaaatagcgaccagctcagtcgcaaatatagtgactaccctaactaagcaacaataaggaatacactatgactgttcaaacaagtaaaaatccgcaggtcgatattgctgaagataatgcattcttccctagtgaatatagccttagccaatataccagtcctgtctctgatcttgatggcgtggactatccaaaaccttatcgcggtaaacataaaattctggtgatcgccgcggacgaacgttatttgccgaccgataacggaaaactgttcagcaccggtaaccatccgattgaaacgttgctgccgttgtatcatctccatgctgcaggtttcgaattcgaagtggcgaccatttccggtctgatgaccaagtttgaatactgggctatgccgcacaaagatgaaaaagtaatgccattctttgagcagcataaaagcttgttccgcaatccgaagaaactcgcggatgttgttgccagcctcaacgctgatagcgaatatgcagcaatctttgttcctggtggtcatggcgcacttattggtttacctgaaagccaggacgtggctgccgctttacagtgggcaatcaaaaatgaccgttttgttatctccctttgccacggcccggcggcttttctggcgcttcgccacggcgataacccactgaatggttattccatttgcgcattcccagacgccgcagacaaacaaacgccagagattggctatatgccgggtcatctcacctggtacttcggcgaagaactgaagaaaatgggcatgaatatcattaatgacgacatcaccgggcgagtacataaggaccgtaaacttctcaccggcgacagtccttttgcagcgaatgcgttgggtaaactggcggcgcaggaaatgctggcagcttacgcgggttaatccctgttacgtttgaatgtaagcgcataatcaatcgcggccgcgttagtactcacgacgtggctgcgttttttcacggttaatttatggcgtactgaagccctatgttaatttctttgcggtaacgtaatccggaacacattatgcttattgagatagtgatacgtagcacttcccccatgcaattcggcaatcgctttgactaaagaaaggcctagtccctgacctacggaatgacggctattatctccccgccaaaatctacggaagagtttttcaggctcattaattttcgttccagggctggcgatatcaatattaagatagctgttggtatcaagaaaactggttatatgaatacggcttttttctgggctatatctaatggcattaacaataagattgcttaacattcgttgtagtaaaattttatccgcaaagatttgctgattgcactcgaccttaaagcaaatctctttctcgtcactaaggtattcaagatagtccaacaaattttcgacttccttattgagagaaaggctgtccagtttcaccaaaacattgtttttatctgccctggcaagaaacagtatgttctctgttaaccggctaatattttccagctcttcaatgtttccggcaattgttttttgatattcagcgatacttctggtttgactgagcgtaacctgattctgacccagtaatgcattaattggcgttctaagttcatgagcgagatcgtcagcaaactgacttagacgctcaaaatctttgactaaagcatgatgcattttattcaacgcctgcccaagaggttttagttctctcggtaatgcgctaacctcaacaggctctcggctatcgttataattcagcgcttccgttacaccactcaactttttgatctctcgtaatcccgttctgattaacagcggacttaatacactgcaaagtacaatggcgacaatgcaaattataatgctattaattttatactgttcaagcatgttatgtctggcactagccaatttagccacagtaaccgttaaacttgggctaacttcatcaatattaattcgtaaagcatctatctctgtatcattaataatgcttctgtaaatgccagctgcgctgattgtctcactagcaggtatgttatttaacatgccatcactgacatttgtccggttaacaattttattgatgctatcaccatgaataatcaagatatcctgactaacatccatcatccggttaaagtacacaggtaacgtatctggatttaccccatcaattaacaactgcttgatctgcgctgtccggttaatgagtgttgtatcatcgcgccatttcaactcacttgccaggccattatagagagtccagacaattccggcgccagcaacagacagtagcaatataaaaagcaaggttaaacggacggttatagatagtcttttcattatttttttaccgctacgaaactatagcccatcccccggattgtggcaattagcttttcaggaaaaggatcatcaacttttgcgcggagcctgcgaatggcgacgtccaccgtattggtatcactatcaaagttgattccccaaatttcactcgcaataaccgttctgggtataatttcgccagctctggaggccagtagccaaagtaactgaaactccttgcgcgtcagtgtaatactgatattgtccctgctcacactatgactaacagagtccattcttaagccgctgatttctaatgtactattcaaagcgtgatgttgccttaattgtgcccgaacccttgccagcaactcagaaaaactaaaaggttttaccagataatcatttgccccactgtccagccctctgactctgtcatcgacagaatcccttgcagtaaggcaaataacaggggtttgctttgctgttcttaacgtttgtaagatctgccagccatccatacccggaagcataatatccagaatgatcaatgcataatcatccttcagcgcaagataaagcccatctctgccatcagaaacggcatcgatgacataacccgcttcggaaagcccctgcgttacccattcctgggtcctttgattatcttcaataagtagaatcttcatgaaaataatatgccataaatcatatgttatagaaacagcctggttcattacaaaattgtaatgctgctgtaaggttaccctggacgctttttcgctatcctcaaaactcattcacatgacaaggatataaacatgttaaagcgttatttagtactcagcgtagcaacggcagcatttagtttaccttctttggttaatgccgcacaacaaaacattcttagcgtgcacattttgaaccagcaaacaggaaaacccgctgctgacgtgacagtcactcttgaaaagaaggcggataacggctggttacaacttaataccgccaaaacagataaggatggacgaattaaggcactgtggcccgagcaaactgcaactacgggcgattaccgtgtcgtatttaaaaccggggactatttcaagaaacaaaatcttgaaagtttcttccctgagatccccgttgaatttcatattaataaagtgaacgagcattatcatgtgcctttattacttagccaatatgggtatagtacctatcgtggcagttaatgcataaatatgtaaaagcagatctctgctactgttagggaggacactccctgacagattaacagtaaacggctcttgctggctaacgacaaaaaagtgtgatggcttatgaaaaagaatcaatttttaaaagaaagtgatgttacggccgagagcgtattctttatgaagcgtcggcaggtgttaaaagcactgggcatcagtgcaactgcactttctttgcctcacgctgcgcatgccgatctgcttagctggtttaaagggaacgatcgcccgcccgcccccgccggaaaagcgctggagttcagcaagcctgccgcctggcaaaataacctgccactgacgccagcagataaagtttccggttataataacttctatgaattcgggctggataaagccgatcccgccgctaatgctggtagcctgaaaaccgatccatggacactgaaaatcagcggcgaagtggcaaaaccattgaccctcgatcatgatgacttaacccgtcgcttcccgctggaagagcgtatttatcgtatgcgctgcgtggaagcgtggagcatggtggtgccgtggattggttttccgctgcacaaattgctggcgcttgccgaacctaccagcaatgcgaagtatgtcgctttcgaaacaatttatgcaccggaacagatgccaggccagcaggaccgctttatcggcggtgggctgaaatatccttatgtcgaaggattgcgtctcgacgaagcaatgcatccgctcacactgatgaccgtaggtgtttatggcaaggcgttaccgccacaaaatggcgcgccggtgcgactgattgtgccgtggaaatatggctttaaagggattaaaagcatagtcagtattaagctgacccgcgagcgtccgccaaccacctggaatctggcagcgcctgacgaatacggtttttacgccaacgttaatccgtatgttgatcacccgcgctggagtcaggctaccgaacgatttattggtagtggcggcatcctcgatgtacagcgccagccaacgctactgtttaatggttacgccgcccaggtggcaagcctgtatcgtggcctggatttgcgggagaatttctaaatgcgtctgacagcaaaacaggtgacatggctgaaagtttgcctgcatcttgccggattgttgccgtttctctggctggtctgggcgatcaatcacggtggactgggtgccgatccggtgaaagatattcagcattttactggtcgcactgcactgaaatttttgctggcgaccttgttaatcacccctctggcacgctacgcaaaacagccgttattgatacgcactcgccgcctgttaggattatggtgctttgcctgggcgacactgcatttaacaagttacgcattgctggagctgggcgtgaataatctggcgttattaggtaaggagttaattacccggccttatttaacgttaggtattatcagctgggtaattttgcttgctttagcgttcactagtacccaggcgatgcagcgaaaactcggcaagcactggcaacagttgcataatttcgtctatcttgtcgcgattctggccccaatacattatctgtggtccgtgaagattattagtccgcagccgctcatctacgctgggctggctgtactgcttttagccttacggtataagaagttgcgttccctttttaaccggttacgcaagcaggttcacaacaaattatctgtataacttcatattgccgacaaagtacgcgttatccctgccggatgtggcgcgagcgccctatccggcatacacagatcgcatcaggttatgtttcgtttgtcatcaacctcaaatcaccaaaataatttattttatttcaataagatagataagtagaactgagaaagccatgctctcgtttcctaagagttgttgcattttgctatatgttacaatataacattacacatcatatacattaactctggaggaaactgttttggcgattcgtctttacaaactggctgttgctttaggtgtctttattgttagcgctcctgcctttagccatggtcatcacagtcacggcaaacccttaacagaggtcgaacaaaaagctgctaatggtgtttttgatgatgccaatgtacaaaaccgaacgctcagtgactgggatggagtctggcaatccgtttatcctttactgcaaagtggcaaacttgaccccgtctttcagaagaaagcggatgcagataaaactaaaacatttgctgaaattaaagattattatcacaaaggttatgcaacagatatcgagatgattggcattgaggacggcattgttgaattccatagaaataatgaaacaacaagctgtaaatatgattacgatggatacaaaatactcacctataaaagtggcaagaaaggcgttcgttacttattcgaatgtaaagatcctgaaagcaaagcccctaaatatatacaatttagcgatcatataattgcaccacgaaaaagttctcattttcacatttttatgggtaatgatagtcagcaatctttattaaatgaaatggaaaactggccaacgtattatccatatcagttgagtagcgaagaagtggtcgaggaaatgatgtctcattgagtattctcatgataacgcctcgatgccgctttagtaagttatcataactgccactggtccatccacaaacgccactgaacgcaagctagctacagacacgctcatcactatgacgtgtctgtatattaataagctaacccgcattgagttaaccaataacggattccatacacaatacggccaacagagaaagatacctgtgctcacgccattgcttatattggctggttacaatatgcactatcaattttttaaataacaaattattaaaaccacatctgtataaggaatttttaaggttcgtgggatagcttgactgtgaaaatcacaggagctacaaaaatgaaccgattcagtaaaactcaaatttatttacattggataacgctgcttttcgttgcaataacctatgccgcgatggaactccgtggctggtttcctaaaggtagtagtacttatctgctgatgcgagaaacacattacaatgcgggtatattcgtttgggtgttaatgtttagtcgcctgattataaaacaccgttatagtgatccttctattgtgccaccgccacctgcctggcaaatgaaagcggctagcctaatgcacatcatgctttatataaccttccttgcacttcctctgctggggattgctttgatggcttacagtggaaaaagctggagtttccttggtttcaatgtgtctccctttgttaccccaaacagcgaaattaaagcactgataaaaaatattcacgaaacctgggcaaatataggctactttttaatcgcagctcacgctggcgcagcactctttcatcactacattcagaaagataatactctgttacgaatgatgcctcgccgcaaataagtcgatccccttacaaggaaatgtgaaccatggacatcaacgcgtcataaatgtttacgcaagtgcacaatgcaccctttccactatcaacaaggaggagcagaaactgtgtaaatcgtacaatggtaagacttatcaaaaatacaggttaattttggtatttaaaccttttttacttgttagtatgatacaaaggctttcaaaaaagctgcgaaattcaacaactcttggaaattatggactttgtcccgcggctttaatctgacggccgcgttccttttttgactcaattattgaacccttctctacgcaacttcagttcccaccaccaactttgcggcagtttcataggatgaatgtctaaaagaataatggtgagcgataagaaaacgactgaataactgcacattttcgctcgaaagcttcctgtcagatccatagcgaatcaagtgctgaatgtcacagtatcgaacagaaaacagtgacgatctaacccttcaagaatattctacgattgttctgtttaggaaaagaaaggcgggaagtcgggagataagtcattgataaaggttcagatggttgccatgatgccaggaaatttggcattttaacagtccctgtccgtgcaattttgttcaagtgacgagtttgcgagcaaaacgatgattaagtggccctggaaagtacaagaaagtgcacatcaaactgcccttccctggcaggaagcactaagcatcccccttttaacgtgtctgacggaacaggaacaaagcaaattagtcactcttgccgaacgttttttacagcaaaagcggcttgttcctttacagggctttgaactggatagtttaagaagctgccggatagcacttctattttgcctacccgttctggagttaggactggaatggctggatggttttcatgaagtcttaatttatcctgcgccatttgtggtcgatgatgaatgggaagacgatatcggtctggtgcataaccaacgtattgttcagagtggtcagagctggcagcaagggcctatcgttttgaactggttggatatacaagattcttttgatgcttctggttttaacctgattattcatgaagtcgctcataagctggacacccgtaacggcgatcgcgccagcggagttccctttattccgttgcgtgaggttgctggctgggaacacgatcttcatgctgcaatgaacaacattcaggaagaaatcgaattggttggcgagaatgcggcgagcattgatgcttatgcagccagcgatcctgctgaatgttttgccgtactttctgaatatttctttagcgccccagaactttttgctcctcgtttccctagtttgtggcaacgtttctgccaattttatcaacaagatcctttgcagagactgcatcacgctaatgatacagacagctttagcgcgacgaatgttcattaattaacaactttgcagattaattaaccaattgaaatgacttatgaaatttagtgttgacagacaaggtaccgctaagtaatattcgccccgttcacacgattcctctgtagttcagtcggtagaacggcggactgttaatccgtatgtcactggttcgagtccagtcagaggagccaaattctaaaaattcgcttttttagcgcaatgtcactgaccttagttgaacattgttttttaacggatagcgggttttaacatcttaagcgccctcgacctttatggttgagggcgttttgctatgaacgccatcaccattttcccctcgattataaaacttgagttattcagtagtctcccctcttgcaactcacacccaaaactgcctaacgaaaagttattaattttcaatcatattgctatcagtatttacattttttcgctgtgctagaaagggcgcatttatgttagctcgtagtgggaaggtaagcatggctacgaagaagagaagtggagaagaaataaatgaccgacaaatattatgcgggatgggaattaaactacgccgcttaactgcgggtatctgtctgataactcaacttgcgttccctatggctgcggcagcacaaggtgtggtaaacgccgcaacccaacaaccagttcctgcacaaattgccattgcaaatgccaatacggtgccctacacccttggagcgttggaaagcgcccaaagcgttgccgaacgtttcggtattagcgtggctgagttacgcaaactcaaccagtttcgtacgtttgctcgaggttttgataatgtccgccagggtgatgaactggatgtcccggcacaagttagtgaaaaaaaattaaccccgccgccgggtaatagcagtgacaacctcgagcaacagatagccagtactagtcagcaaatcgggtctctgctcgccgaagatatgaacagcgagcaagcggcaaatatggcgcgtggatgggcctcttctcaggctagtggcgcaatgacagactggttaagccgcttcggtaccgcaagaatcacgctgggcgtggatgaagattttagcctgaagaactcccagttcgattttctccatccgtggtatgaaacgcctgataatctctttttcagtcagcatactctccatcgtactgacgagcgtacgcagattaacaacggcttaggttggcgtcatttcactcccacatggatgagcggcatcaacttctttttcgaccacgatcttagccgttaccactcccgcgccggcattggcgcggagtactggcgcgactatctaaaattaagcagtaacggctatttgcgactgaccaactggcgcagcgcacctgaactggacaacgattatgaagcacgcccggccaatggctgggatgtacgcgcagaaagctggctacccgcctggccgcaccttggcggtaaactggtctatgaacagtattatggcgatgaagtggccctgttcgataaagacgatcggcaaagtaatcctcatgccataaccgctggacttaactatacccccttcccgctgatgaccttcagcgcggagcaacgccagggtaaacagggcgaaaatgacacccgttttgccgtcgattttacctggcaacctggcagcgcaatgcagaaacagcttgacccgaatgaagtcgctgcacggcgtagccttgcaggcagccgttatgatctggtggatcgcaacaacaatatcgttctggaatatcgcaaaaaagaactggttcgcctgaccctgacagaccccgtgacagggaagagtggagaagtgaaaagtctggttagcagcctacaaaccaaatatgccctgaaaggctataacgtcgaagccaccgcactggaagctgccggtggcaaagtggtcacaacgggtaaagatattctggttaccctgccggcttaccggttcaccagtacgccagaaaccgataacacctggccgattgaagtcaccgccgaagatgtcaaaggcaatttgagcaatcgtgaacagagcatggtggtcgttcaggcacctacgctaagccagaaagattccagcgtaagcttaagtacccaaacattgaacgcggattcccatagtaccgccacactgacttttattgcgcatgatgcagcaggtaatcctgttgtcgggctggtgctcagcacgcgtcacgaaggtgttcaggacatcaccctttctgactggaaagataatggtgacggaagctatacccagatcctgaccacaggagcgatgtctggcacgctgacgctgatgccacagctgaatggtgtggatgcggctaaagcccccgccgtggtgaatatcatttctgttagcagttcccgaactcacagcagtattaagattgataaggaccgttatctctccggcaatcctatcgaggtgacggtagaactgagagatgaaaatgacaaacctgttaaggaacaaaaacagcaactgaataacgcagtcagcatcgacaacgtgaaaccaggagtcactacagactggaaagaaaccgcagatggcgtctataaggcgacctataccgcctataccaaaggcagtggacttactgcgaagctattaatgcaaaactggaatgaagatttgcataccgctggatttatcatcgacgccaacccgcagagtgcgaaaattgcgacattatctgccagcaataatggtgtgctcgccaatgagaatgcagcaaacaccgtcagcgtcaatgtcgctgatgaaggaagcaacccaatcaatgatcataccgtcacgtttgcggtattaagcggaagcgcaacttccttcaacaatcaaaacaccgcaaaaacggatgttaatggtctggcgacttttgatctgaaaagtagtaagcaggaagacaacacggttgaagtcacccttgaaaatggcgtgaaacaaacgttaatcgtcagttttgtcggcgacagcagtactgcgcaggttgatctgcagaagagcaaaaatgaagtggttgctgacggcaatgacagcgtcacaatgaccgcgaccgtccgggatgcaaaaggcaacctgctcaatgacgtcatggtcactttcaatgttaatagtgcagaggcgaaactgagccaaaccgaagtgaatagccacgacgggatcgccacagctacgctgaccagtttgaaaaatggtgattatagggttacggcctctgtgagctctggttcccaggctaatcaacaggtgaattttatcggtgatcaaagtactgctgccctgaccctcagtgtgcctagtggtggtatcaccgtcaccaacacagctccgcaatatatgactgcaaccttgcaggataaaaatggcaacccactaaaagataaagaaatcaccttctctgtgccaaacgacgtcgcaagtaagttcagcattagcaacggaggaaaaggcatgacggatagtaacggggttgcaatcgcctccctgaccggcacgttagcgggcacgcatatgatcatggctcgtctggctaacagcaatgtcagcgatgcacagccaatgacgtttgtggcggataaagacagagcggttgtcgttttgcaaacaagcaaagcggaaatcattgggaatggcgtggatgagacaactctgacagcaacagtgaaagatccgagcaatcatccggtggcggggataacggtaaacttcaccatgccacaggacgttgcggcaaactttacccttgaaaataacggtattgccatcactcaggccaatggggaagcgcatgtcacgctgaaaggtaaaaaagcgggcacgcatacggttaccgcaacgctgggtaataacaataccagtgatagccagccggtaacatttgtggcggacaaagccagcgctcaggttgtcctgcagataagtaaagatgagatcacaggtaatggcgtcgatagcgcaacgctaactgcaacggttaaagatcagttcgacaatgaggtgaataatcttccggtaacattcagcagtgcctctagtggactcaccctgaccccgggagtaagtaataccaacgagtctggcatcgcgcaggccactctcgcaggcgttgcctttggtgagaagacggttactgcaagtctggctaataatggtgccagcgacaacaaaactgtgcattttattggcgacacagcggcggcaaaaattatcgagttggcgcctgtcccagacagcataatcgccggtaccccgcagaacagctccggcagcgtcatcaccgccacagtcgttgataataatggctttccggtgaaaggtgtgactgtgaacttcaccagcaacgcagcgacagccgaaatgacgaacggcggtcaagccgtgacgaacgaacagggtaaggctaccgtcacttataccaatacccgctccagcatagaaagtggagcgagaccggataccgttgaggccagtctggaaaatggtagctccacgcttagcacaagtattaatgtcaacgctgatgcgtctacggcacatctcaccttgctacaggcactttttgatacagtctccgcaggcgagacaaccagtctgtatattgaggtgaaggataattacggcaacggtgtcccccagcaggaggtaaccctcagcgttagtccaagtgaaggcgtgacccccagtaataacgctatatatactaccaaccacgacggcaatttttacgcaagctttaccgctacaaaagccggggtttatcaattgacggcaaccctcgaaaatggcgatagcatgcaacaaacagtgacctatgtgccgaacgtcgcgaatgctgaaatcacgctggcagccagcaaggatccggtgattgccgacaataacgatctcacgacactaacagcaacagtcgctgatacagagggcaatgcgatagccaacactgaggtaacatttactctgccggaagatgtgaaggcgaacttcacgctgagcgatggcggtaaagtgattactgatgctgaaggcaaagcgaaagtcacgctgaaaggtacaaaagcaggcgctcatactgttacagcaagcatgactggcggtaagagtgagcagttggtggtgaactttattgcggatacgctcactgcgcaggttaatcttaacgttaccgaggacaattttatcgctaataacgtcgggatgaccaggctgcaggcaacagtgactgatggaaacggcaacccgttagccaatgaggcggtgacattcacgctaccggcagatgtgagcgcaagctttactctcggacaaggcggttccgccattactgatatcaacggcaaggctgaagttacactgagcggtacaaaatccggcacctaccccgtgacagttagcgtgaacaattatggtgtcagtgatacgaaacaggtgactttgattgccgatgctggtaccgcaaaactagcctccttaacctctgtatacagtttcgtcgtcagcacgaccgagggcgcaaccatgacggcaagcgtcactgacgctaacggcaacccggtagaaggcataaaagttaatttccgcggaacctccgtcacgctaagcagcaccagcgttgaaacggatgatcggggtttcgctgaaattcttgtgacaagcaccgaggtcggactgaaaacagttagtgcctctctggcagataaacctactgaagtcatcagccgattactgaatgccagtgcagatgttaattctgcgacgattaccagtctggagataccggaaggtcaggtaatggtcgcacaagacgtagcagttaaagctcacgttaacgaccagtttggcaacccggttgcgcatcaacccgtgacattcagtgcagagccatccagccaaatgatcatcagccagaatacggtctctactaatacgcagggtgtagccgaggtcaccatgacgcccgaaagaaacggtagctatatggtgaaagcatccctgccgaatggagccagtcttgagaaacaactggaggctattgatgaaaaactgacactcacggcgtccagtccgcttatcggtgtctatgcccctacaggcgctactctgacggcaacgctaacctctgcaaatggcactccagtggagggtcaggtcatcaactttagcgtaacgccagaaggggcgacgttaagtggcggaaaagtgagaactaactctagtggtcaggctccagtcgttttgaccagcaataaagtcggtacatatacggtgactgcatctttccataacggcgtaacaatacagacacagacaaccgtgaaagtcactggcaacagtagcaccgcccatgttgctagctttatcgctgatccaagcactatcgccgccaccaacactgatttaagtaccttaaaggcaacggttgaggatggcagtggtaacctgatcgaaggtctcactgtgtacttcgccttaaaaagcggctctgccacattaacgagtttaacagcggtgaccgatcaaaacggaatcgcgacaacaagcgtgaaaggagcgatgacaggtagcgtcacggtaagcgcagtcacgaccgctggtggaatgcaaacagtagatataacgctggtggctggcccggcagacaccagccagtccgtccttaagagcaatcggagtagtctgaaaggggactataccgatagtgctgaattacgtcttgttctgcacgatataagtggcaatccgatcaaagtttctgaagggatggaatttgtgcaaagtggtactaacgtgccctatataaaaattagcgcaattgattacagtctaaatatcaacggtgattacaaagccactgttacaggaggcggagagggtatcgcaacgctgatccctgtattgaatggtgttcatcaagctggtctgagtaccacaatacaattcactcgcgcagaagacaaaataatgagcggtacagtaagtgtcaatggtactgacctaccgacaactacattccctagccaggggttcaccggggcgtattatcagttgaataatgacaactttgccccaggaaaaacggcggctgattatgagtttagtagctctgcctcctgggtcgatgttgatgctaccggtaaagtgacatttaaaaatgtcggcagcaatagcgaaaggattacggcgacgccaaaaagtggaggccctagctatgtatacgaaatccgtgtgaagagttggtgggtgaacgccggcgaggctttcatgatatacagccttgctgaaaatttttgcagcagcaatggctacacgctccccagagcaaactatttaaaccactgtagttcccgaggcatcgggagtctgtacagtgaatggggagatatggggcattacacgactgacgctggttttcaaagtaatatgtattggagttctagtcccgcaaacagtagcgaacaatacgtagtttccctggcaacaggtgatcaaagcgtatttgaaaagcttgggtttgcttatgcgacatgttataaaaacctgtgattttccgttataatttcttaaagagtgttccattcggggcactcttttttacattccctctacagaactagcccttctctcacagaaaatgaataaataaaaatgcggcaccgccagaatcgcgttcgatgtgactatgatcattttcggtgagtactgctttgatctaaaggctggttttctgtgatgattgaccagcctcagagtattgatgacaccaccgttcataacagatcggcattactatgcataagtactgtctcatattctcgccaaaacactttttaatgcctttgcgaattcatccagacttatattgtcaattttttgcccaacgacgactgactccgagacatcggccattgcgggccatcgcgttttgtaatcagcataaattgcaacaacaggggtattataggcacttgccatatgtaatattgaggtgtcaggagttattgcgatataagcatcttttatgattgctgctgaacgtttaatcgagggtggtaaggataaacggtagacattattataacaatccactaatgccctggctttatcttcacctttgggtccatgaacgatcactattggtatatctgtttcactttaaatttttgctattagattttctgcaatcgataatgaaaatgtacgttcctgcgagctaccttctaaattgaacgcaatgtaagatcctaacgatcgcatttcctcgcgcacctcatcgagtacatcctcacttagtggcaattcatatattggcctgactgctggaaaacccgcctcacgcatcataaatgcccatgtcataggtacgggagcccggagtttctgatccatactggacgcgttcttgcacaaaggggagaagcaattcatggttataccaacaacctgaaaattcgtttttgctttcaactgactgataaataacatcgttttcaggttctttttacgcatcccctcaatgcaaagatccggcgtaccgtattgctgtgttatgttctttgctaaatcttttatttcttttaatgttgcgtgatcctgcatagtcattgtgactaatgttaatttagtctgttcaagtttaagcgcattaaagacttctaaattaattgtcgacgttacaattaaaagatgcttaattttatgcaattcaagcgcccgaataacaggaaagatggccatagcatcgccaatctgatcgggaatatggatgacaacaaagtctgttttttcaatattgaaattataagctttataatcgtagtaactaaatgcaatacgtctcaacaatgatgctaaaaacatacctaacctcgcctccctactggttataatgcaatgcagtctatcagactcatcagggtgccattttgtgcatatgcggacttttatgtttcatatctctaacctgtgggtcctctgcttaatccttaaacaacaccagcaactcctgcgctttcatcttccatcgaatttttcatgttgccgctaatcagccataaaatcatttgcagatgcgctctgtcgaggtagtctcataaggttcgtttatagatcgacggcaatgtgagttaccttttccatactaattataaaaagacagtacaaacaggatcattatggactccacgctcatctccactcgtcccgatgaagggacgcttagcttaagtcgcgcccgacgagctgcgttaggcagcttcgctggtgccgtcgtcgactggtatgattttttactctatggcatcaccgccgcactggtgtttaatcgcgagtttttcccgcaagtaagcccggcgatgggaacgctcgccgcatttgctacctttggcgtcggatttcttttccgtccgctcggcggtgtcattttcggtcactttggcgaccgactgggacgtaagcgcatgttaatgctgaccgtctggatgatgggcatcgcgacagccttgattggtattcttcctagtttcagcaccattgggtggtgggcacctattttgctggtgacactgcgtgccattcagggatttgcagtcggcggcgaatggggaggcgcggcgttgctttccgttgaaagtgcaccgaaaaataaaaaagccttttacagtagcggtgtacaagttggctacggtgtaggtttactgcttagtaccggactggttagtttgatcagtatgatgacgactgacgaacagtttttaagctggggctggcgcattcctttcctgtttagcatcgtactggtactgggagcattgtgggtgcgcaatggcatggaggagtccgcggaatttgaacaacagcaacattatcaagctgccgcgaaaaaacgcatcccggttatcgaagcgctgttacgacatcccggtgctttcctgaagattattgcgctacgactgtgcgaattgctgacgatgtacatcgttactgcctttgcacttaattatagtacccagaatatggggctaccgcgcgaacttttccttaatattggtttgctggtaggtggattaagctgcctgacaattccctgttttgcctggcttgccgatcgttttggtcgccgtagggtttatatcacaggtacgttaatcggaacgttgagcgcatttcctttctttatggcgcttgaagcacaatctattttctggatagttttcttctccataatgctggcaaacattgcgcatgacatggtggtgtgtgtgcaacaaccgatgtttaccgaaatgtttggtgccagttatcgctatagtggcgctggagtcggttatcaggttgccagtgtggttggcggtggatttacaccttttattgccgctgcactcatcacttactttgccgggaactggcatagcgtcgccatttatttgctggctggatgcctgatttccgcaatgaccgctttgttgatgaaagacagtcaacgcgcttgatagcctggcgaagatcatccgatcttcgccttacacttttgtttcacatttctgtgacatactatcggatgtgcggtaattgtatggaacaggagacacacatgaataataagggctccggtctgaccccagctcaggcactggataaactcgacgcgctgtatgagcaatctgtagtcgcattacgcaacgccattggcaactatattacaagtggcgaattacctgatgaaaacgcccgcaaacaaggtctttttgtctatccaagtctgaccgtaacctgggacggtagcacaaccaatccccccaaaacgcgcgcatttggtcgctttacccacgcaggcagctacaccaccacgattactcgccctactctctttcgtagctatcttaatgaacaacttacgttgctgtatcaggattatggtgcgcatatcagtgtgcaacccagccagcatgaaatcccttatccttatgtcatcgatggctctgaattgacacttgatcgcagtatgagcgctgggttaactcgctacttcccgacaacagaactggcgcaaattggcgatgaaactgcagacggcatttatcatccaactgaattctccccgctaagccattttgatgcgcgccgcgtcgatttttccctcgcacggttgcgccattataccggtacgccagttgaacattttcagccgttcgtcttgtttaccaactacacacgttatgtggatgaattcgttcgttggggatgcagccagatcctcgatcctgatagtccctacattgccctttcttgtgctggcgggaactggatcaccgccgaaaccgaagcgccagaagaagccatttccgaccttgcatggaaaaaacatcagatgccagcatggcatttaattaccgccgatggtcagggtattactctggtgaatattggcgtgggaccgagtaatgctaaaaccatctgcgatcatctggcagtgctacgcccggatgtctggttgatgattggtcactgtggcggattacgtgaaagtcaggccattggcgattatgtacttgcacacgcttatttacgcgatgaccacgttcttgatgcggttctgccgcccgatattcctattccgagcattgctgaagtgcaacgtgcgctttatgacgccaccaagctggtgagcggcaggcccggtgaggaagtcaaacagcggctacgtactggtactgtggtaaccacagatgacaggaactgggaattacgttacagtgcttctgcacttcgttttaacttaagccgggccgtagcaattgatatggaaagtgcaaccattgccgcgcaaggatatcgtttccgcgtgccatacgggacactactgtgtgttagtgataaaccgttgcatggcgagattaaacttcccggccaggctaaccgtttttatgaaggcgctatttccgaacatctgcaaattggcattcgggcgatcgatttgctgcgcgcagaaggcgaccgactgcatagccgtaaattacgaacctttaatgagccgccgttccgataataagttctgaaccttcttatcagaaatagatgtgaaggagtaagtaagacacctggcaaatagcctgcaataatcgtgggctgtttgcttccttgggcggatacgagttttattatcgtcttaatgatttccacatattaaaagcaagtatgctttcaaaacacaattataaaaaatcccgccaacaatataagtttttataaaattaaatataagattatggctttagaatatttttatttctaatagacgagatttttcctgttatgatataatatgctgaattaacacatgttaacgatttaccagtaatgtaaataaattttcgaggagatcattccagtgggacgtaaatgggccaatattgttgctaaaaaaacggctaaagacggtgcaacgtctaaaatttatgcaaaattcggtgtagaaatctatgctgctgctaaacaaggtgaacccgatccagaattaaacacatctttaaaattcgttattgaacgtgcaaagcaggcacaagttccaaagcacgttattgataaagcaattgataaagccaaaggcggcggagatgaaacgttcgtgcagggacgttatgaaggctttggtcctaatggcagtatgattatcgccgagacattgactagtaatgttaaccgtacgattgctaacgttcgcacaattttcaataaaaaaggcggcaatatcggagcggcaggttctgtcagctatatgtttgacaatacgggtgtgattgtatttaaagggacagaccctgaccatatttttgaaattttacttgaagctgaagttgatgttcgtgatgtgactgaagaagaaggtaacattgttatttatactgaacctactgaccttcataaaggaatcgcggctctaaaagcagctggaatcactgagttcagtacaacagaattagaaatgattgctcaatctgaagttgagctttccccagaagatttagaaatctttgaagggcttgttgatgcccttgaagatgacgacgatgtacaaaaagtttatcataacgtcgcaaatctctaattatcttttaaagaaatctgtctttacggcagatttctttaatctcatataattcttataaaaaatataatattcaactcgtcatattgattatacccccccgttcccagagaaataatatttattaaaattccagttcttctttttctgattacagaaggcaaagtggcaattacgcatagtttcccgataaagacgcgatagcgacatcccgcataaggcatttttctctttatctttgtacggtacttcatggaacagagtttttgaccttgcgaatcgtgatgtctgttggggagggacaatttgctcactgaagcgtgagactcgattaagcgcacgaaacacagaaatcaaaaaacccggtcacttttttacaaggtaaccgggtaaaaataatttttattttttaactgttttgagactcatagagatgtctcaaaactaaaatttggctcctctgactggactcgaaccagtgacatacggattaacagtccgccgttctaccgactgaactacagaggaatcgtgagaacgaggcgaatattagcgatgcccacccacaatgtcaaagcctgttttttaaatttgaaatcgtttgctgaaataatctgcattttgtcgtttattcgctcacaactggctttttttcacacttttgcggctcgggtcgagggtatttccatagccaacgtccagtaaccattcgccagtaaaacagcacggcccgcacagcccagtcggcaaacattcccatccagacaccaaccacaccccagccaagcatgattcccagcacataaccgactacaacccgacaaccccacatgctcaacatgctaacccacatggcgtaacgggcatcacgagcacctttaaatccagcgggtagcacccaactggcggaccaaataggcataaataaagcatttagccaaatcagaatcacaacgacatgtttaacctgtggatcctgggtgtaaaagcttgccataaccccggcaaagggagccgttagccaggcgatggccgttaatccaagagtggaaagccagaacacatgccgcaactgaatctctgcttgcgctatctgccctacccccaaccttcggcctgtaatgatcgtagaagcagagccgagcgcacttccgggtaagttgataagagccgcaatactaaacgcgataaaatttccggcaataacactggtccccatcccggcaacgaacatttgggttaataaccgaccactggtaaataacacactttcgacactcgcgggaataccaatccccatgacttcccagataatgctaaaattcagcggtttaaaatagctctttaagctaatccttagcgcaggattaaaaccaatcgccagcacccacaaaattgcaactgcgccaatataacgagaaatggttaaacccagccctgccccgacaaatcccagtcccggccaggagaaaaggccgtaaatcaatatgccgctaataataatattaagaatattcaggctaccgttaatcaatagcggtattttcgtattccctgcaccacgaagtgccccgctaccaataagagtgatggcagctgctggataactgagtaccgtcagctccagataagtcaacgccagtgctttaacttctgtcgtggcatcacccgcgacgaaatcaataatttgttcgccaaaatgatgaataagcgttgccaacagtacggcaaacaacgtcatgatcaccaaactctgccgcgtcgccaccctcgctcgtcgtcgatcccgcttaccgagactaaatgccacaacgacagtagtaccaagatcgatagcagcaaaaaaagccataatgaccatattgaagctgtccgccaatcccacgccggccatcgcatcttttcccagccagctgaccagaaaagtgctcagaacccccatcaacaggacacaggcattctccatgaagataggaacagcaagcggggttatctcgcgccagaacaacactttgtagctcttgcgtttagcgtgccagcgagtgccgtgaacaacctggcgtaaagcagaggagatattcaaagcgctccttaattgcagaaagtgaaaccacatttcaaataaactgggagaatcagcaaagctgcaaagattttcgccaacaaattgtctgcaaatgcaacaaactgtacttagaaacggcaaacagttggggaatttaaaaatcgggttactcaaaagatttttcgccgttaagatgtgcctcaacaacgattcctctgtagttcagtcggtagaacggcggactgttaatccgtatgtcactggttcgagtccagtcagaggagccaaattcctgaaaagcccgcttttatagcgggatttttgttatatctgataatcaatttcctcttcactgctttccatcacctgccgcttgatatcctcaacactcagtcctgcattacaaagttccagaaagcgccagacatagttacgctgaagttgtcctcgcttcagtcccaaccagacagtattagcatcaaaaagatgccgcgtatccaggcggattaaattctcttcctcttgttcgccactggattgctcggcaactaatccgatcccaagcccaagagcaacataggttttaatgacatcagaatcctgcgcacttaatacaatatctgccagcaaacctttgcgggcaaatgcgtcatcaatacgactgcgccccgtaatcccctgtcggtaagtgattaacggccacttcgctatactttccagcgtcaatggactaatttgcgtcaagggatgatcgtgtggaacaagcaaactatggtgccaacgaaaccacgggaaggcgacgagctgcgggtcattactcaaacgctcgctggcgataccaatatcagcttcgccattttgcaacaatgtcgcaatttcctgtggcgtcccctggattagctcgagccgaacctccgggaaaagttcgcgaaaagctttaatgacctctggcaagctataacgtgcctgagtatgcgtcgttgcaatagtgagaacgccagacgtatcgttggtaaacaggtctgcaagccgacgaacattactggcttcattcagaatacgttctgcaatgaccagtaatgctttgcccggttcagtcatgcccagcagtcgcttacctcgtcgaacaaatatttcgatgccaagttcatcctccagttcccgaatatgacggctgacgccactctgactggtaaaaagcatattcgcaacctctgtcaggttgtaatcctgacgtgcagcctcgcggattatctttagttgttggaaattcacggtaaactccgggcagttcagatttcccgttattgttaaagtctaatgcccggcataacaaataataaaaacccgcatcttattccatcccgatataacacttagctcaccaattgccactgccttttttccatcactggagaactaatcacactcattaacaactctttcactgcctgtgcctgtgggcttaagttcgctctggcgggtaaatttaaactcaaagagagactcatggaaggagtggtaatgcgactcatccacccatttactgcgccacataagctacgcgcggcgctttcgggtaatactgcaacgcccatgccgctggcaatcgctgcggtaagcgtggcaatagactcaatttcaccaataacttttgccgtgagtcgccgtagggaaaaagcctcatcaacacgaagtctaatagcactgtaatcactggggagaaagaggttcatttgcgcaatagcattcacatcaacgctttgccccgggcaatcttgagttcctaccagaaaaagatcttctttcagcaaagcctgactggatacaccagccacaggggaatgctcataaatcaccgccatatcgagttggtgatttatcaatttttcgttaagcactgcaccactattttcatgaagatagataacgatctccggaaattcagcgcgaaccgcctgtaataagggcatggtgatggaactcgcagcggttcctggtgcaaagccaatgctgacttgcccgcttaatgcctgaccaacgttatgcaccgccagttgggcctgttcacactgacgtaaaatggcccgcgcatgggtatagagaatttttccggcgtctgttggtgtaacgccccgctttgtacggatcaaaagttgttgatttaactcaccttccagtgtggcaacctgctggctgagcgctggttgtgcgatatgcaatacttcagcagcctgggtcaggctaccaatatctacaatttttacgaagtatttcaggcgtctgaagttcatgttgcctccggtttttaagaatcggcccaagtgccgccattacttacaaccagattgcaagatgcttgccagttttattttggtgttgatgtacaagctaaccaactgtcaaataagagattatgatagattcgtcatttgctcctttaatcagctgtcgcgttcccctgccctataaaaggagggtatgcaccacgatggttcattacccaataagattgaaagctcaccactttgttgaaattgacagcaaacaaacaaaaaaatgcatttcaccctttgacatcaccatgcactgccattaatatgcgccccgttcacacgattcctctgtagttcagtcggtagaacggcggactgttaatccgtatgtcactggttcgagtccagtcagaggagccaaattcaaaaaagcctgctttctagcaggctttttgctttctaattaccaacgctcttaaaacatctgtctactaccagaactaatttgcacaggcattccgcttcgacgttgcaacgcagcatttgcgcgatttacatcaacttcttgcccgttgataaacgcccgcaaagatggggttaccggcaatggcacttttcggtcagactcatattctgcacgattgcggctcaatggctcatgaacttccagccagttgctgccatctggttcagtggtgtattttactggctggtcgataatttgcacacgcgtcccaacaggaacattatcaaacagatatttgatatcgtcattgcgcagacgaatacagccctgacttacccggagcccaataccaaaattggcattggtaccatggatggcatacaacctgccaatataaatcgcgtacagccccatgggattatcggggcccgcaggaacaaatgcgggcaaactctcccctcgtttcgcatattcgcgccgagtgttcggcgttggcgtccaggttggagcttcttgtttacgttcaacggtagtcacccagttacgcggggtttctcgcccagcctggccgataccaataggaaagacttccacagtattactgtctggtgggtagtaataaagacgcatctcagcgacgttaacaacaatccctttacgaacagtgtcgggcaaaatcagttgctgcggaatggtgagttggctgccagacttcggcaaaaaaacatcagcgcccgggttcgcttccagcatgttacttaacccttgcccgtattgtgcggcaaaagtctccagcggctgggtattgtgatcaggaacagttacagtaaagctctgccccactaaacggctaccctctggaggtaatggataagttaccgccaggctagtatggctggcaaaaagcagagcaaaactgcaaagaatatttacacgacgcatcatgtccctttcctatgtcgcgaaagctatccgttaagtatagcttttatcagacttttcgtttttaactgttcaaatcagaagtcgtattccccggtagaacaatattactggcagcaagttcgcccatgttgttgtatatcgcacaggcagcttcgatgatgggcatcgccagagctgcgccactcccctcacctaaacgcatctccatattgagataaggctccagccccaaatggctgagcgctatacgcgcgcctttttctgcgctcaggtgagaaggaatgagatacggtttgatcgcaggagacatctggcaggctgcgagcgcagcagcataagaaagaaatccatccagcaacacgggtaaaccgcaggaagcagcacctaacatcactccagctattccgaccaaatcaaatccacccacttttgccaggacatcaacaccatcctgaggatttggttgattcaacgtaatcgcccgacgcacaacatcaattttattagccagtttatctgtcggcaggtttgcgccaatcccaaccacttcttcaggatcccggccagtgattgtgctgactattgctgctgccggtgtcgtgtttgccatccccagttcacctacaccaaacagcgtgacaccgttttttgccagctcctgcgtataacatatgacgtccaaaagcaacttttcagcctgacggcgactcattgccggagcactagcaatattgccgctacctcgtgcgacacgcatgttgataagcccggggataggctcagcagtatcaataccaacatcaattacgtggacgttagcgcccgcttgttctgccagcacacacacgccggttgttccacgggtcatattttcagcctgtatggctgtcacttcttttggagaaatagcgaccccttcctcccagacgccgtgatcggcacacataaccagtaccgcttttttgcccacatgcggtatgccattcaaccccggcattcctgccagttgtatggcaagcacctccagctttcccaggctaccaacaggtttgagtaacccgtcaatatgccgttgtgcacggctcatagcggtagaatcgatggctgggatcgtattcagtaaatcggcaagtatttgcatctcacgtctctttatagcagtgccagcaggaagaccagttcaccaagctctatggctgctcccagcgtatcgcccgtttgcccgcccagcgtacgtttgagaagctgaccgaggatgaaaatcgccaccatcgtcaccaccatagcagccacaccatgcatacccggcaataatacggcagcaaaaatagcggctaagccgagtgtgacgcaggtttgtcgcccatcaattttgccaatgaacacattgccaagcccttcttcccgcgcataacgatgacgatacatcaataatgcggcagtcccgcggctgaccgcacatgctgccgccaggcttgcaaggatgctttcgccacgcagagccaactcgcttaacaccagaatctttgccagtaccacaaaaatcaatgccagaccgccgtgggtgcctaaacggctatcacgcatgatttccaacatgcgatcgcggctacgtgcagaaaatacgccatcacaggtatcagcgaggccgtccagatggaatcccccggtcatcagcaccagcacaagtacgctaaacagtgccgccagtggtgcgccacaccatgcctgcagcaccatgaagaccagcccgctaatcgcgccaagcaataatccaatcaaaggaaaagtaataataccgcgagaataatgctcgaaatccagtccctgggaccagcgacgcggtacaggcagacgcgtaataaaactgagcatcgcccaaaataatttactcatttgatttttactccaataccgctaaccaccagccatacttcatttgccgcagcggccaactgctgatttacccgcccggcaatatcacgaaaatgtcgtgccagacgactctccggcacaatccccattcccacttcgttagtcactaatacaacctttgcggggcaacgttggcaggcagcaatcaagctctgaatctcagcattaatcgcctgttccatcgcctgataatcccattcatcagggtctttatcgccgccataatcaaacaacagattagtcaccattgtggtaacgcattcaagcaacacaacctcattcgggttaatgtctgcatgaattaattcatcaagatgttgccagcgctccactgtgcgccagtgctccgggcggccttgccgatgatgttctatccgtgcagccatctcatcatcaaggatttggctggtagcgatatacagaacctgactagagtccccaataagcgcctctgcgtggcgactcttcccgctccgtgcgccccccgtcaccaaaatcatcataccgactcctgattcaaatgtatgatggtattcattgaacagaacaatggatcccccaccgttgctgaccgcaaaacatttacgcgattaatactgcgcgtaatataattaaaaatccagcattctcaatccattacgaaataagatggcattacggaatagccagactttctcgtgttaacgtccgacaaaatgcgtcattgacagcggtttctgtggattgacacatttcattcagataatgaattaatgctactgccggaacaaccagcaaacgggcattgtgttctgaaatccaggctattgattcaacgtcagcgacagatctgcgctgtaaaagaacttgtaaaacaacgtaatagaattatccggaatggtggcgactatgcactagggaaggtgcgaataagtggggaaattcttctcggctgactcagtcatttcatttcttcatgtttgagccgattttttctcccgtaaatgccttgaatcagcctatttagaccgtttcttcgccatttaaggcgttatccccagtttgcagaaactccgtaatgagattaaaagcgctcataactcatctgtcggccagaaggcgcgcctctgaattatccgacggacaaaccgggaacagtgtaatttcccggcaggagcgaaaaaattgaaaggcgcatcttactcttttcgctttcaaaaaaaagagtggtcatcgcgttaacacaccgccctgagatgaattagtgatgttttggctgcaccgcaacatacatttcgatatcccagtacccatcttccgcgccattgttcaaataaacctcgaagcagggctttggtaacatttcataagcactgtcctgcaagagactattaaagaactgataccagggtttagcaaaatcatcaccgactacacgagctaccgccaccgcatactgaccacctgtaatttctgtcagaatgacgccctcactgttttcgggaagcgtaaagtaacccggcaccgtcacgacggtgtcgcagcgtaatttttcggcgggtgtttcatctggattgtcgtaatagacagcaacccactccttcggcacaatatttttgctatctacccacatcatcaactgctcaaagcctttctttaccgtctgttcccacgggccaacgagatggaaacctgcaacggtacgtttctcttcctgcttaatctcgtagttcatgacgcctccattgatactgtttttatatacagtatagttgcaaaattaaaaccacaaggaatgagtgttgattatgcgagcagactcgcactcctgccagtctgctgcaaaagaaaggtcaggccttatggtggaaataatcactcaggcgagaaaacatgctgccttccccgacagattccagggtaaccagcggccagtgcgccacctgtttatcacggtcgtaaagttcaatttcccctacccgctgatgggcgctaattggcgcggtgagttctttaccatcaagggtatatttggctttgatatgtggaatttcggctttcggtagcaccatccagaactcttgttccgttcccaggtcgatattttctttatcgccataccagatgcgttccgttccgacctttttcccacggtgcaaaatttgcaccgtagtaaagttttgttgcccccaacgcagtaattttcttgcctcttcctcacgaccttttgcactgtcagcccccattaccactgcaatgagacgacgctgcccatctacagcgctagcaatgagattaaacccggcaccagaagtatgacccgttttcaggccgtcaacattcatggttttatcccacaacaacccgttacggttttgctgggtgataccgttccaggtgagacttttctcactgtacatatgataaaactcgggctcgccgtggatgatagcacgagaaagcacagctaaatcataagcgctgctatgctggccaggtgcatccagaccatgcactgtttcaaaatgcgtatccttgagatgcagcttctcggcatagttgttcatcatttcaacaaactgccgttgcccaccggcaatatagtcagccagagcaacacaagcgtcatttccggaatccacaattaaaccacggcttaaatcacgtacgcttacgcgatcgccctctttcaaaaacatcagactagaaccgacaaacaccggattatctttcgcccacgcatcgcgccccacggtgacaatatcgtctggcgtaatgcgatgactatcgatagcgcgatccacgacataacccgtcatcagctttgtcaggctggcgggattgcgctgttgatgctcattacccgcggtgaggatctgaccggtggtgtaatccatcaatacccaggacccggcatgaatctctggaggctgaggactaaaaggaatgttttccgccgcaaaaccagagcttaagttaaaaacgaacaaagaagcagcaataataagacggcgtttcaacagcaaaccctcaggagtttcaaatagctgttctttttacggaaatacttatgaactggctggaataaagtgcaagaaaatgtgactaccctctcatttttatctgacatgatctgttgccactcgctgccaaattgtggcgctaaagctgattagcacggtgatatttgatactctggcagacagcagaaataacggatttaacctaatgatgaatgacggtaagcaacaatctacctttttgtttcacgattacgaaacctttggcacgcaccccgcgttagatcgccctgcacagttcgcagccattcgcaccgatagcgaattcaatgtcatcggcgaacccgaagtcttttactgcaagcccgctgatgactatttaccccagccaggagccgtattaattaccggtattaccccgcaggaagcacgggcgaaaggagaaaacgaagccgcgtttgccgcccgtattcacagcctttttaccgtaccgaagacctgtattctgggctacaacaatgtgcgtttcgacgacgaagtcacacgcaacattttttatcgtaatttctacgatccttacgcctggagctggcagcatgataacagccgctgggatttactggatgttatgcgtgcctgttatgccctgcgcccggaaggaataaactggcctgaaaatgatgacggtctaccgagctttcgccttgagcatttaaccaaagcgaatggtattgaacatagcaacgcccacgatgcgatggctgatgtgtacgccactattgcgatggcaaagctggtaaaaacgcgtcagccacgcctgtttgattatctctttacccatcgtaataaacacaaactgatggcgttgattgatgttccgcagatgaaacccctggtgcacgtttccggaatgtttggagcatggcgcggcaataccagctgggtggcaccgctggcgtggcatcctgaaaatcgcaatgccgtaattatggtggatttggcaggagacattagcccattactggaactggatagcgacacattgcgcgagcgtttatataccgcaaaaaccgatcttggcgataacgccgccgttccggttaagctggtgcatatcaataaatgtccggtgctggcccaggcgaatacgctacgcccggaagatgccgaccgactgggaattaatcgtcagcattgcctcgataacctgaaaattctgcgtgaaaatccgcaagtgcgcgaaaaagtggtggcgatattcgcggaagccgaaccgtttacgcctagtgataacgtggatgcacagctttataacggctttttcagtgacgcagatcgtgcagcaatgaaaattgtgctggaaaccgagccgcgtaatttaccggcactggatatcacttttgttgataaacggattgaaaagctgttgttcaattatcgggcacgcaacttcccggggacgctggattatgccgagcagcaacgctggctggagcaccgtcgccaggtcttcacgccagagtttttgcagggttatgctgatgaattgcagatgctggtacaacaatatgccgatgacaaagagaaagtggcgctgttaaaagcactttggcagtacgcggaagagattgtctaatttgaagcctccgccgctggtacggcggaggacaatgttgagtcaggctttttgaacggtgatgctccacgctgcatcgccaatctgctgataatcggtgatggcatgtccttcttctgccgcccactgtgggattgcttcagttgcctgggtgcaatcaaactcaatcactaactcatcgccgctgaccatttctgccagagctgcttttgcttctatgagtggaaacggacagacctgcgtcaccacatccagctttttaatcaccatctttacaccttacttaatttgccgcagcagttgccagtcgcgccttacgctgcggtcgaacatacacaagccaggacgcagtccagactccgagaatcataaatacaaggccaatccagccctgccaggtcatcattgcagtcataaccagtccattaccgatagagcaaccacctgcaatactggcaccgaagcccatcagtacaccacctaacccgctacgtaatgttgtttgtgcatcagctgcgcgaacgcggaactcacggctcgctttggctgcaataaaactccccacgaagatccctaacaccaggaaaacgccccagttaatgtatttcatgtcacccgcgaccagaaattgcagaatattggccgttggggaagtgattcctaacccaaacatgcgtccggttgcttcactcaggggccaggctaaaagcgcaatcaaaccgatgagtacagctgtgacaaagggatgccagcgtttttcaaacagaatatgagcgatcccggttcggcgcggcggtaaggtcgcgactttgagttttggcttcttcaactctttcatcaccacccagagcgttatcaccagcaaaacggcaaccaacggccacacagacaaattaaaagtctcagcaatagagttatgttcagtactgtagtgctgcaaggtttgatttaaaccactggcatgtggagaacgcatcaccgcactcatcaccatataagtgaaaagcgcgatccaactgccgatcaatccctcacccgcgcgataccaggtcccggtggcacatccacccgccagaacaattcccagcccgaagatatacccacctataacagtaccaagccacgggaacgccccggcttcgtaagtcagtaggcccgcctgaattaacgcaaaaacccccacgctttgtacgctaattgcaatcagcaaggcgtaaaacatgcgattatttttcacgatatacatatcgcgaaaaccacctgtcaggcaaaaacgcccacgctgcatgacaaatcccagcagagcaccacaaattagcccgcttaatatcatactaaacataaattaattaaccagatgaatgttaatgaggaaattattcatgactggtggaatgcagaccaataaccaaattctctaaattagaacaaatggttattaatgaggagttcgatacaaaagaataaaaaaaccggagccaaatgttcattcgactccggtttattattagaaaagatgattatgctacgtcttcgtactgcggaaccggattacggaagctcttggtgacgcaagccaggtaaatcagaccgatagcagcccagatcagacccagaaccatactgctttcttccaggttaacccacagcgcaccaacggtcagcgcaccacacatcggcaggaacagatactggaagtgatctttcagcgtcttgttacgcttctcacggatccagaactggctgatgacgctcaggttaacgaaagtgaacgccaccagcgcaccaaagttaatcagcgccgttgccattaccaggtcgaagttgattgccagcagggcaatcgcgccaaccaggatgatgttcatcgccggagtacgccatttcgggtgtacataaccgaagaagcttttcgggaatacgccgtcacgacccattacgtacatcagacgcgctacgcctgcatgcgccgccataccggacgccagtacggtaatggtggagaagatcagcgcgccaacctggaacgctttacccgcaacgtacagcatgatttcaggctgactcgcatccggatctttaaagcgagagatatccgggaagtacagctgcaggaagtaagttgcaaagatgaagatcatgccgccgatcagcgcggtcaggaaaatcgcacgcgggatcacgcgctctgcatctttggtttcttcgctcaggttgctgatgccgtcaaagccggtaaaggagaagcacaggattgtcgccccggtaatcatcgggataacatgcgcatcgccagaccagaatggacgagtgctcgccagcgtaccagcgccttcaccttcaaatacgccataaacaaccatgcccagaatcaccgcgatcagcactacctgcaacacgacgattacagtgttgaagttcgctacggatttcagactacgcaggttaaaggcggtcataaaggccaccagcgccaccacaaacatccagcttgggatggaaggcaccagagcttcaaaatagattttcgccagtagaatgttgatcatcggcgcgaacagatagtcgagcagagaagaccaacccaccataaagccgacagtcgggctaatggatttctgggcgtaagtgtatgcagagccagcagaaggatagcggcgaaccagcttcccgtagctcagagccgtaaacaggatcgcaatcaatgcgaacgcataggctgtcggcacatgaccatccgtgaggccactaacgataccaaaagtatcaaacagcgtcatcggctgcatataggcaagacccatcattacaaccggaactaacgtaagcgttttacgcaattccacgcgagaggtgtttggagtaacgttatggctcatggtcattctcctttacggtgataaccgtcgcgtaagcaaaaaattgccccatttttttggattcctcagcgacaacaactgtcgatttttagtaaatatctatccggtacgaagcccggcctcttggtatgaatgattggtttgaagcaaaaaataaccgacgctgatgaaacgtcggtttttagtcattttttgacagcggcgcattgtgcctaaatgggggggaaatgacaagagaatgagaggcttgtcagaataatttttctttaaatggcactttttccgtcatcagattttgcataaacaccggcgatcgcactatttgctaaaatttcatcccgccaccagccactggcaagtcctgcggtctgttcgttccagccaatccagacgggttcaaagagagtttgggcgaccactttcttctcgattaacgcgccactatcgagaaaacgttgcgccagataacggggtaaatagccgcagccgaggccgctaatttgcagctccagtttggttttaaaatcgaaaacggtaatggcttcttgttcgtcgagaagttgacttgccgtagaagcgcctgcctgcgcagtatcccccaccacaatcgcccgatatcgcttaataatacgacgatttaacggctcttcttccagggctaacggatgatgaggcgcgaccgcaaagacttgttccagatcgcccaaccgactaaaaccaaactcactggaagatggtggctcatgcatcgcgccaacaataatatccgctcgcccctgagtcagggcatcccaactaccaccgagtacgccattgataaacttcaggcgcgtcacgctatgatgttgataaaaagcttcaatgagtggcgcaagcagagaaaaaggaaacgtgtcgtccacgccaatcaccagctcgttttcccagccttcatgcagtttgatcgcctgcttttccagttcccgcacggtatgcagaacttcccgccctttctctaataacatttttccggtgcgggtgaatttagcgcggtgtccgctacgatcaagcaattgaatattaaggtcgctttccagcttgtgaacggtgtaactcagagcggacggcgtcttgtagagtttggcgctcgccgccgcaaaactgccttctttttctaaggcatcgaggatcatcaacacatccagcagtggtttcatacacgcccccttgcagtgcatgcggcgtcctgctggcgtgatcgtttactccagcggcattaccagcggatcgggatactggtattcaaatcccagttcattacaaatccgactgccatcaataatcttacctttgccgctgtccagactatttctgaactgcggaggttccagccccagtaaacgggccatctgcggatagaaaacattacgcgcagggtgagctggcgcacatatattatagatgtgtccgcctttaggtgcctgtaacaacagagtgatagcgccaataacatcttctaaatggactaaattaacaccatgttcaccatcaggcgcggtttttccggcaaagaagcgtccgggatgacgtcccggtccgaccaggcccgcaagacgcagaatatcgacgctagtaccgggtaaattgtgcagccagtcttcgagttcttctaatactcgtccactgttggttactggattacgcggggtggtttctttcaccgtgccttgcgcgtcgccatagacagatgtactgctggtaaaaataatgcggggaatacgatgggccagcgcgctatccactaactcttgtaccgcttgtaaatagaactcatcgccggggccgctacgacgtgccggaagcgtaatgaccagcgcatcggcatccatcagggcatccagatcgtcagaatcgcaaactagctcaggctccatgcgaagcagatagctatcaatgccactcattcgggccgcttcgacaccatcttgtgtggttttactcccggtgacttgccagcctcgcgcactaagactcatcgccagcggcatgcctaaccaccctaacccgacaattgcgacctttttcatccgttatctcctgatacaccttagatctataaggctacgctagcgtatcaaaactgacaattcattctatgaatgaatctgttcaataatgataacgacatgctgcaatgagcagactatcgtcggtaaccgcgtataccagacggtgctcctctgtaatgcgtcgggaccagaaaccactcaaattatgtttcaggggttctggcttccccttaccttcaaatggcgttctgcgggtatctttgataagttcattgatctttttaacaattcgcttatctgtttcctgccagtacagataatcgtcccaactttcctcagaccagattagtttcactcaatgatgtccttttccgttcctttgccacttttcaggctatcgatactgtccatcaatctccgggcgttagcgggggagcgcagtagataagccgtctcttccaggctgttgtattcttcgagactcatcagaacacaagcctctccattctgacgagtaataaggatcggggcatgatcttcaacggctttcatcattgttgcgctcaaattctgacgcgcttcgctgtagctaattgtacgcatgtcaatctcctcttttgtacagttcattgtacaatgatgagcgttaattaactatttattaattagtttgtagatcaaggtattgtcagtgagacgaaaatccaggcttcgctatttttggtgccatcagctaagaggacagtcctcttagccccctcctttccccgctcattcattaaacaaatccattgccataaaatatataaaaaagcccttgctttctaacgtgaaagtggtttaggttaaaagacatcagttgaataaacattcacagagacttttatgacacgcgttcaatttaaacaccaccatcatcaccatcatcctgactaatctttcaggcgatgtgtgctggaagacattcagatcttccagtggtgcatgaacgcatgagaaagcccccggaagatcaccttccgggggcttttttattgcgcggttgataacggttcagacaggtttaaagaggaataacaaaatgacagacaacactcgtttacgcatagctatgcagaaatccggccgtttaagtgatgacagtcgcgaattgctggcgcgctgtggcattaaaattaatcttcacacccagcgcctgatcgcgatggcagaaaacatgccgattgatattctgcgcgtgcgtgacgacgacattcccggtctggtaatggatggcgtggtagaccttgggattatcggcgaaaacgtgctggaagaagagctgcttaaccgccgcgcccagggtgaagatccacgctactttaccctgcgtcgtctggatttcggcggctgtcgtcttagcctggcaacgccggttgatgaagcctgggacggtccgctctccttaaacggtaaacgtatcgccacctcttatcctcacctgctcaagcgttatctcgaccagaaaggcatctcttttaaatcctgcttactgaacggttctgttgaagtcgccccgcgtgccggactggcggatgcgatttgcgatctggtttccaccggtgccacgctggaagctaacggcctgcgcgaagtcgaagttatctatcgcagcaaagcctgcctgattcaacgcgatggcgaaatggaagaatccaaacagcaactgatcgacaaactgctgacccgtattcagggtgtgatccaggcgcgcgaaagtaaatacatcatgatgcacgcaccgaccgaacgtctggatgaagtcatcgccctgctgccaggtgccgaacgcccaactattctgccgctggcgggtgaccaacagcgcgtagcgatgcacatggtcagcagcgaaaccctgttctgggaaaccatggaaaaactgaaagcgctgggtgccagtagtattctggtcctgccgattgagaagatgatggagtgatcgccatgagctttaacacaatcattgactggaatagctgtactgcggagcaacaacgccagctgttaatgcgcccggcgatttccgcctctgaaagcattacccgcactgttaacgatattctcgataacgtgaaagcacgcggcgatgaggccctgcgggaatacagcgcgaagtttgataaaaccacggttaccgcgctgaaggtgtctgcagaggagatcgccgccgccagcgaacgcctgagcgacgagctaaaacaggcgatggcggtggcagtaaagaatattgaaaccttccacactgcgcaaaaactgccgccggtagatgtagaaacgcagccaggcgtgcgttgccagcaggtcacgcgtccggtagctagtgttgggttgtatattcctggcggctccgccccgctcttcagtacggtattaatgctggcgactccggcgagtattgcgggctgtaaaaaagtggtgctgtgcagtccgccgccgattgccgatgagatcctttatgcggcgcagctgtgcggtgtgcaggacgtgtttaacgtcggcggcgcacaggccattgccgcactggcgtttggtacggaatctgtgccaaaagtggacaaaatcttcgggccgggtaacgcctttgtcaccgaagcgaaacgtcaggtgagccagcgtctggacggtgcggcgatcgatatgcccgcaggcccgagcgaagtgctggtgattgctgacagcggcgctacgccggatttcgtggcttctgatttgctctctcaggctgaacacggcccggacagtcaggtgattttactgacgcccgctgctgatatggcgcgtcgcgttgccgaggccgtcgaacgccaactggcagaactgccgcgtgccgaaaccgcccgccaggcactgaacgccagccgcctgatcgtgactaaagatttagcgcagtgcgtggagatctccaaccagtacggcccggagcacctgatcattcagacccgcaacgcccgtgaactggtcgatagcatcaccagcgccggtagcgtatttcttggtgactggagtccggaaagcgcaggtgattacgcctccggcaccaaccacgttctaccgacttacggttacaccgccacctgttccagcctcgggctggcagatttccagaagcgcatgaccgtacaggaactgagcaaagaggggttctccgcgctggctagtaccatagaaacactggccgccgccgagcgcctgaccgcccacaaaaatgccgttactttgcgtgttaacgcccttaaggagcaagcatgagcaccgtgactattaccgatttagcgcgtgaaaacgtccgcaacctgacgccgtatcagagcgcgcgtcgtctgggcggtaacggcgatgtctggctgaacgccaacgaataccccactgccgtggagtttcagcttactcagcaaacgctcaaccgctacccggaatgccagccgaaagcggtgattgaaaattacgcgcaatatgcaggcgtaaaaccggagcaggtgctggtcagccgtggcgcggacgaaggtattgaactgctgattcgcgctttttgcgaaccgggtaaagacgccatcctctactgcccgccaacgtacggcatgtacagcgtcagcgccgaaacgattggcgtcgagtgccgcacagtgccgacgctggacaactggcaactggacttacagggcatttccgacaagctggacggcgtaaaagtggtttatgtttgcagccccaataacccgaccgggcaactgatcaatccgcaggattttcgcaccctgctggagttaacccgcggtaaggcgattgtggttgccgatgaagcctatatcgagttttgcccgcaggcaagcctggctggctggctggcggaatatccgcacctggctattttacgcacactgagcaaagcttttgctctggcggggcttcgttgcggatttacgctggcaaacgaagaagtcatcaacctgctgatgaaagtgatcgccccctacccgctcagcacgccggttgccgacattgcggcccaggcgttaagcccatagggaatcgtcgccatgcgcgaacgggtagcgtaaattattgcagaacgcgaatacctgattgccgcactgaaagagatcccctgcgtagagcaggttttcgactctgaaaccaactacattctggcgcgctttaaagcctccagtgcggtgtttaaatctttgtgggatcagggcattatcttacgtgatcagaataaacaaccctctttaagcggctgcctgcgaattaccgtcggaacccgtgaagaaagccagcgcgtcattgacgccttacgtgcggagcaagtttgatgagtcagaagtatctttttatcgatcgcgatggaaccctgattagcgaaccgccgagtgattttcaggtggaccgttttgataaactcgcctttgaaccgggcgtgatcccggaactgctgaagctgcaaaaagcgggctacaagctggtgatgatcactaatcaggatggtcttggaacacaaagtttcccacaggcggatttcgatggcccgcacaacctgatgatgcagatcttcaccagccaaggcgtacagtttgatgaagtgctgatttgtccgcacctgcccgccgatgagtgcgactgccgtaagccgaaagtaaaactggtggaacgttatctggctgagcaagcgatggatcgcgctaacagttatgtgattggcgatcgcgcgaccgacattcaactggcggaaaacatgggcattactggtttacgctacgaccgcgaaaccctgaactggccaatgattggcgagcaactcaccagacgtgaccgttacgctcacgtagtgcgtaataccaaagagacgcagattgacgttcaggtgtggctggatcgtgaaggtggcagcaagattaacaccggcgttggcttctttgatcatatgctggatcagatcgctacccacggcggtttccgcatggaaatcaacgtcaaaggcgacctctatatcgacgatcaccacaccgtcgaagataccggcctggcgctgggcgaagcgctaaaaatcgccctcggagacaaacgcggtatttgccgctttggttttgtgctaccgatggacgaatgccttgcccgctgcgcgctggatatctctggtcgcccgcacctggaatataaagccgagtttacctaccagcgcgtgggcgatctcagcaccgaaatgatcgagcacttcttccgtagcctcagttacaccatgggcgtgacgctacacctgaaaaccaaaggtaaaaacgatcatcaccgtgtagagagtctgttcaaagcctttggtcgcaccctgcgccaggccatccgcgtggaaggcgataccctgcccagcagcaaaggagtgctgtaatgaacgtggtgatccttgataccggctgcgccaacctgaacagcgtgaagtctgccattgcgcgtcacggttatgaacccaaagtcagccgtgacccggacgtcgtgttgctggccgataaactgtttttacccggcgttggcactgcgcaagcggcgatggatcaggtacgtgagcgcgagctgtttgatctcatcaaagcctgtacccaaccggtgctgggcatctgcttagggatgcaactgctggggcggcgcagcgaagagagcaacggcgtcgacttgctgggcatcatcgacgaagacgtgccgaaaatgaccgactttggtctgccactgccacatatgggctggaaccgcgtttacccgcaggcaggcaaccgcctgtttcaggggattgaagacggcgcgtacttttactttgttcacagctacgcaatgccggtcaatccgtggaccatcgcccagtgtaattacggcgaaccgttcaccgcggcggtacaaaaagataacttctacggcgtgcagttccacccggagcgttctggtgccgctggtgctaagttgctgaaaaacttcctggagatgtgatgattattccggcattagatttaatcgacggcactgtggtgcgtctccatcagggcgattacggcaaacagcgcgattacggtaacgacccgctgccgcgattgcaggattacgccgcgcagggtgccgaagtgctgcacctggtggatctgaccggggcaaaagatccggctaaacgtcaaatcccgctgattaaaaccctggtcgcgggcgttaacgttccggtgcaggttggcggcggcgtgcgtagcgaagaagatgtggcggcgttactggaagcgggcgttgcgcgcgtagtggtcggctccaccgcggtgaaaagtcaagatatggtgaaaggctggtttgaacgcttcggtgccgatgccttagtgctggcgctggatgtccgtattgacgagcaaggcaacaagcaggtggcagtcagcggctggcaagagaacagcggcgttagtctggaacaactggtggaaacctatctgcccgtcggcctgaaacatgtgctgtgtaccgatatcagccgcgacggcacgctggcaggctctaacgtctctttatatgaagaagtgtgcgccagatatccgcaggtggcatttcagtcctccggcggtattggcgacattgatgatgtggcggccctgcgtggcactggtgtgcgcggcgtaatagttggtcgggcattactggaaggtaaattcaccgtgaaggaggccatcgcatgctggcaaaacgcataatcccatgtctcgacgttcgtgatggtcaggtggtgaaaggcgtacagtttcgcaaccatgaaatcattggcgatatcgtgccgctggcaaaacgctacgctgaagaaggcgctgacgaactggtgttctacgacatcaccgcttccagcgatggccgtgtggtagataaaagctgggtatctcgcgtggcggaagtgatcgacattccgttttgtgtggcgggtgggattaagtctctggaagatgccgcgaaaattctttcctttggcgcggataaaatttccatcaactctcctgcgctggcagacccaacattaattactcgcctggccgatcgctttggcgtgcagtgtattgtggtcggtattgatacctggtacgacgccgaaaccggtaaatatcatgtgaatcaatataccggcgatgaaagccgcacccgcgtcactcaatgggaaacgctcgactgggtacaggaagtgcaaaaacgcggtgccggagaaatcgtcctcaatatgatgaatcaggacggcgtgcgtaacggttacgacctcgaacaactgaaaaaagtgcgtgaagtttgccacgtcccgctgattgcctccggtggcgcgggcaccatggaacacttcctcgaagccttccgcgatgccgacgttgacggcgcgctggcagcttccgtattccacaaacaaataatcaatattggtgaattaaaagcgtacctggcaacacagggcgtggagatcaggatatgttaacagaacaacaacgtcgcgaactggactgggaaaaaaccgacggacttatgccggtgattgtgcaacacgcggtatccggcgaagtgctaatgctgggctatatgaacccggaagccttagacaaaaccctcgaaagcggcaaagtcaccttcttcagccgcactaaacagcgactgtggaccaaaggcgaaacgagcggcaatttcctcaacgtagtgagtattgccccggactgcgacaacgacacgttactggtgctggcgaatcccatcggcccgacctgccacaaaggcaccagcagttgcttcggcgacaccgctcaccagtggctgttcctgtatcaactggaacaactgctcgccgagcgcaaatctgccgatccggaaacctcctacaccgccaaactgtatgccagcggcaccaaacgcattgcgcagaaagtgggtgaagaaggcgtggaaaccgcgctggcagcaacggtacatgaccgctttgagctgaccaacgaggcgtctgatttgatgtatcacctgctggtgttgttgcaggatcaggggctggatttaacgacggtaattgagaacctgcgtaaacggcatcagtgagttgcggggtaagcggatgcgatattgttgccgcatccggcaaaaaaacgggcaaggtgtcaccaccctgccctttttctttaaaaccgaaaagattacttcgcgttgtaattgcgtagagcattacgccccagcacaatccccgcgccaaccatgccacccagcagcaccgccagaatcaaggtaattgcctttttcgggctatcacgacgaataggtaacatcggtttcatcacataacggtaagcatgaatatcaagatcatcaacttttaagctttcgatatccagcaggttttgacgagtctgatagtagtttgggctgaacaccaacggacgggtcgcctcatgcttaatcatgctctccagcgcttcgctccccaaaaggaacaacgtatcttgtgtgatatcttcgccagtctgttgaatctgcggttttgtcacctgcgcctgattcgcatactgcaacgcttcctgaatctgacggatacgcagatctttctgctcctgcgcgactacttcctgcgttcttaaagagtcctgcaagtttttccgtcccagagcaatgttgtctttgagatccttttctagctcttgattcactttatcgtcaacttgctgaatgtattgggccaacttcatttgtgcgccctctgcagtttgcccaacataagaaacagtcaatggtaattgctggttcttaacagaaggttcgatggtaagtttttctcgttcttcctgattatccagcgtttctgctaatgcagagaaggcagaactgaagcgaccaattaacgtctcctgcaaatcgcttactttcggtgcagcctgaccatagataacattcatggcattgttatagccagcaatttgccccacgtcgggctgagtgataattgctgtactcgtccatttctccttcgctactgccaaatatccaatagccagggcaatagccacaatgacggaaatgatgattgtcatcttgccacgccacaactgcactagtaaatcaatcaaatcaatctgttccgggtcatggttttgcccagaaacattattattttctactctcatcattaccctaactgacggaaatttccaagtccgcatagtttagcgataatcctcgtgaatgctataggataagtgataaaaataatgaattgttgtgtaagtaacaaaagacaatcagggcgtaaatagccctgataacaagatgttagtcgctgccaaagagatcgcgggtgtataccttatctgccacatccttaagctcttctgccattcggttagagataatgacgtcggcttgttgtttgaaggtggcgagatcacgttccaggcgagagttgaagaaactgtcttctttcatcactggctcgtagatgatcacttcaacacctttcgccttgatacgtttcataatcccctgaatagaagacgcacggaagttatcactaccgctcttcataatcagacgataaatacccaccacttgcggcttgcgactcaaaatggcatcggcaataaaatctttacgcgtgcggttagcatcgacaattgcgctgatcaggttattcggcacagactggtagttcgccagtaactgcttggtatctttcggcagacaataaccaccataaccaaagctcggattgttgtaatggttgccaatacgtgggtcgagacaaacgccttcgattatttgacgggaattcagacctaaactttctgcatagctatccagttcgttaaagtacgccacgcgcatcgccaggtaggtgtttgcaaaaagtttaatcgcttctgcttcagtggagtcggtaaacagcatcgggatattttgcttaatcgcgccttcctgtaacagagcagcgaaacgttctgcgcgttcactacgctcaccgatgacaatacgactaggatggagattatcgtaaagggctttaccctcacggagaaattccggggagaatataatattttcagtgcgatatttcttatgcatcgctgcggtaaaaccaacgggaaccgtacttttgatgaccataaccgcataaggatttatctcaactacgtctttaattacactttctacactggatgtattgaaataattagttttaggatcatagtcggttggagtggcgatgatgacataatcagcatcccggtaggcttcatttttatctaatgtggcattaaagtgtattttatcactttgcaaaaactgctgaatttccttatcaacaataggagatatccgatcattcagcatagcaacgcgactcggtaaaatatctaatgccacaacctcatgattttgtgcgattagaagcccgttactcaagcctacatagccagtaccggaaatggtgattttcatttcatgctctcagaattaacttaactgtgaatcatgatgtttttagcatcctgataagagctaaaagttttaacgctacgttgttcgatggtcaacgcaacgaaaaacaattcagattttctttataagaatagctgatatttattaagttaatattaagcagtgaaatttagtctataagatatttggcaaaaaaaagcccggtgcaatatacgccgggcctcaattttattgttggttaaatcagattaatccagccattcggtatggaacacaccttctttatcaatacgcttataagtatgcgcaccaaaatagtcacgctgtgcctggatcaggttcgcaggcagaacagcagcacggtagctgtcgtaataggcaaccgctgcggagaaggtcggaaccggaataccgttctgtactgcataagcaacgacatcacgcagcgcctgctggtagtcatcggcaatttgcttgaagtacggagccagcaacaggttagcgatctgtggattttcggcataagcatcggtgattttctgcaggaactgcgcacggatgatgcagccagcacggaaaatcttcgcgatttcgccgtagttcagatcccagttgtactcttcagacgcagcacgcagctgagagaagccctgggcgtaagaaacgattttgcccagatacagcgcacgacgaactttttcgatgaactcagccttgtcgcctgctggctgtgcttgcggaccagagagaactttagatgcggcaacacgctgatctttcagagaagagatataacgtgcaaacacagactcggtaatcaggctcagcggttcgccgagatccagcgcgctctggctggtccatttaccggtacctttgttagccgcttcatccaggatcacatcaaccaggtagttaccgtcttcatcttttttggtgaagatatctttggtgatgtcgatcaggtaactgctcagttcaccgttattccactcggtaaaggtctgcgccagttcttcgttggtgaggttcaggccacctttaagcagagaataggcttcagcaatcagctgcatatcgccgtattcaataccgttgtgaaccatcttcacatagtgacctgcgccatcggcaccaatataggtaacgcatggttcaccgtcttcagctacggcggcgattttggtcaggatcggtgctaccaattcataggcttctttctggccaccaggcataatagaaggacctttcagcgccccctcttcaccgccagaaacaccggtaccgatgaagttaaagccctctgcactaagctcacgattacgacgaatagtgtcctggaagaaggtgttaccaccatcaatgatgatgtctcctttatcgagatatggtttgagggaatcaatagcagcatccgtgcctgcacctgctttcaccattaacaggatgcgacgaggcgtttccagagattcgacaaactctttcaccgtatagtaaggaaccagtttcttgcctggattttcggcaatcacttcttccgtcttctcacgggaacggttgaaaatagagacggtataaccacggctttcgatgttgagcgcaaggttgcgtcccatcactgccataccgactacgccgatctgttgcttggacattacatactcctgtcaggtgtgatcaccgcgctgaatgctcgcggcctggaatgttcgcaaataagtatacaaagtacttattaaagtataaatagcttatccatgcttatatgcttacggctttatatgtctccacatgcgatatttcttaaataatgttttattattaccacttttaattcagggataatgtgaggttattaccctcaaataatatgagataaatagtgctgcaacattgcatttttgccccgatttatccatgatcgaattgtgacatttgtcatacaacgaataggttttgtacttactatggaatggattgccgatccgtctatctgggccgggttaatcacgctgattgtgatcgaactggtcctcggcattgataacctggtctttattgccatcctcgccgaaaaactaccgccgaagcagcgtgaccgcgcacgggttaccgggctgctgctggcaatgttaatgcgcctgttactgctggcgagtatctcctggctggtcaccctgactcaaccgctgttcagcttccgcagctttacctttagcgcccgcgacttaatcatgctgtttggtggtttcttcctgttgttcaaagccacgatggagctgaacgaacggctggaagggaaagacagcaataatcccacacaacgcaaaggtgcgaagttctggggcgtggtgacgcaaattgtggtactggacgccattttcagtctcgacagtgtgattaccgccgtcgggatggtcgaccatttactggtcatgatggccgccgtggttatcgctatcagcctgatgttgatggccagcaagccgttaacgcaatttgttaacagtcacccgacgatcgttattctctgcttaagcttcctgttgatgattggctttagcctggtggcagaaggtttcggcttcgtcattccgaaaggctacctgtacgctgccattggtttcagcgtgatgatcgaggcgctcaatcagttggctatctttaaccggcgacgttttctttccgctaaccagacgctgcgccagcggactaccgaagcggtaatgcgcctgcttagcgggcaaaaagaagatgcggaactggacgccgaaaccgcgtccatgctggtggatcatggtaaccagcagatctttaatccgcaggaacggcggatgattgagcgggtacttaatcttaaccagcgtaccgtcagcagcattatgacgagccgccacgatattgagcatatcgatctcaacgcgccggaagaagaaatccgccagttgctggagcgaaatcagcatacgcggctggtggttaccgacggtgatgacgcagaagatttgctcggtgttgttcacgttatcgacctgctacaacagtctctgcgcggcgaaccgctcaacctgcgggtgttgattcgccagccgctggtgttcccggaaaccttgccgttgttacctgccctggagcagttccgtaatgcccgcacgcactttgcttttgtggtggatgagtttggcagcgtggaagggattgtgacattaagtgacgtcactgaaaccattgccggtaacttaccgaacgaagtggaagagatcgacgcccgccatgatattcagaagaatgcggacggttcctggacggcgaatggtcatatgccgctggaggatctggtgcaatatgtgccgctgccgctggatgaaaaacgtgaatatcacaccattgccgggctgttgatggagtatttgcagcgtattccaaaacctggcgaagaagttcaggtgggggattatttgcttaaaacgttgcaggtagaaagccatcgcgtgcagaaggtgcagattataccgctgcgtaaggatggcgagatggagtacgaggtgtgatggtatcggtcattttacccaatagccgaaaggaataagatgagggaaccgcgccatcggcgatttaccgccgggagcccgggttgccagggtggtggagattgagccaccctggcacgttcaccggcttgagcgttccatagtagcgaggaacatcaagtgaacggaacagccttcgatcttacatattcagaatataatgatgccgccacgaacgcctgatgcgacgctttacgcgtcttatcaggcctacaggactggtcacctggtaacttacatcttctccagcaacttcttcacatctttgccattacgggaatctttattccgctcggcccagtcattcaggcgacgtttcgcttcgtcctgtagatgtttgcgcagtaactgatccacttgcaggctgtaattgagttgctgccagttgccataaacccgcagcggtactggcgtttctttcaggaaatcaatcagtttgctttccccgttccagccacccacgacccgaatatcaaactgggtgtcgcaggtttgatctgccagattcaacatgccttcccctgtcagcgccagcacagggctttgaccttgcatgtcgtttaacgtcacgacgccatccttcaacgtcaaatcggtggtaaagcggtcaagccgcgtcacgttatcaaagttttcagcggccttcacatcaccgccattacgctctaccgcttgctgaatcatctgctggaagttcatcccttccatgcgcgtgtcggtcatttcgacatgtgcctgtccttgccagttgtggcggaatgcgtcggcatctatgtcagcaccggagaaatcaccagccagactcatttttccggtcaagctaatcggatagttaaacgccttcagaatggtaccaatctcaacgttttccagccgtggctggaagtttatccgcggatttatacttgtcgcgtccagcgtgcccggcagactaacctgtccaccgttaagtttgccctgcagttgagtaatttccagcaaaccgctcttgttggtcatttgcgtggcaacatctgtaaaattcattccgcgccagcgcacgttactggcctgcaacaaaatatcagccgtaaagccttgcagtccctgataggccggttcatcaatacggctagaaatgaccgggcgcggcaacgtactttggctctgcccctgctgcgcggcaccgttttcaccattcgcggtttcattaagcgggatgaggttgtcaagattcagttgcgggaattgcagcctcagctgccattccggtttctctgtcagcgtaacctgtgcttgcccgcttagcgtactatcattggcggtcaaactaatttggttaaaactaaggcgtttatgactctcctgccactgggcctggaaactcccctgcccctgaataccttgttttggtaaatcggcaccctgcaactgccagttaatttgttcaatagccgccgttaaatcatgcggataatcagaagcatctaccgtaccgttaagggatatcgtgagatcgcgctgatcgcgattaacccgcccggagaactcaaaactaccacgatgttggggatcttgttccatttgcaggcgaatattgcggattgtcacctgctcgtcatcttcatgctggaacaccagcacgctgtccgccaccttaagactggatatatcaaagctccatccgcgatcgtcactcagatccggcaaggtattgtcgcgcggtgcaaccggagcgtcttcactgcgcaccgcttccgtctgcggcgtcagttggatcactgccccttttagcatcacctgcttaacgctcagttgatgactcagtagtggtaaaagcgccacgtccagacgcatgttgtcggcgcgaaccagtggctggcttgcgccctgggcggtgagagacattcgcccggagaggatactaagctgcggccagacgtgccaacgcagtggcccgtcgagctgcaattgataaccgctacgtgcagcaacttgcttgaccatatagtcgcggaaatcattcggattcaccagcaacactaacgcagataacccggccaccagcacgaccaggagtatcatcagcgtcgtcagaaatcgtctcatggtatcctcaatgggcctgaattagtctttatcgattcggctggctaccgcgccctgctggttgcgatatttcgcatcttcacggcggttgtaaggtcgcaccgccgggccggaaagcggctcaaagctcagcgcaccaattaacatgcccggacgcagcgccagcggcagcttaccggagttgtagaactccagcacaatgcaaccagaccagcccggatcgatgcggtgcgcggtgacgtgcaccatcagccccagacgcgccagactggaacgcccgtccagccagcccaccagatcggctggcagcgtcacgctctccagcgtcaccgccagcgccagctctcctgggtgaagatagaacgcctcgccctcgtcgagaacgatctcatcgctcatcacgcggtcaagcgcggcgctcacttcatctttgggaccgctcagatcgataaacgctgccgtgtgaccacggaaggtacgaaatttattgcccaggcgtacatccaccgtcgcgccgttaatacgctccactggcggacgtgggttgatgctcaaacggccttcatcaagccaggcttcaatatctcggtcacacagacgcatggcattttctcctttcgcgcatcactcccttaacgccaattacgtcaagggcatactaggttatcactgaacggtacacaatttatcaagcttattcaaagaactgacttattttcgctttcaatatatcgatcgcgatgcggtttttcccgccgcgcggcacgataatgtccgcatattgtttagaaggctcaatgaattgcaggaacatcgggcgcacggttttttgatattgcgccatcacactatccatactacgcccacgctcgttaacgtcacgcttgatgcggcgcatcaggcagatatccagcggggtatcaacgaaaatggagaagttaagttcgtcacgcaaacgcgcatccgtcagcaacaaaatgccttcgagaatgatgaccttcttcggctcaaccgtcaccgtttctttcatacgcgtatgttcaacatagctgtaaaccggcaggtcaattgcgctgccgcgtttcaacgcttgtaaatgctcaagcagcagactgtgatccatcgcgctgggatggtcgtagttggtcttaacgcgttcttccatgctcagatggctttgatctttgtaatagcagtcttcgggaattacgccgatgtgttcatcaccgacttgctcacgcaattcacgataaagggtactggcaataagactcttgccggaagcgcttgcgccagcgataccgataatgacgcactgatgagactgatcagtcatatatttagcgacctgattaacctggatgttaggaagggggcgacgaagcgccaaacgcggcaattatagggatttcatccgtctgataccagtcgaatagcgttgccgcgcgctcagagttaattgttgacaaagaattcccgggggcaaattacgttgatcagttttatgtaaggtaaaaaatgttaaacgcagttgcgcaaattatccgcctttacgtcactttatgagcaattcgcatataaaatgtaaaacttttgtactagcataaacacagaaacgaatactggcgaccaggtcttgcggataaagcggtaatgagcaaacaaagtcagcatgtattaattgccctgccccacccgctgcttcacctggtcagtttaggtttagtcagctttatctttacccttttcagccttgagcttagccagtttggcacccaactcgccccactgtggttcccgacgtccatcatgatggtggcgttttatcgccatgccgggcgcatgtggccgggaattgcgctgagctgtagcctgggaaatatcgccgcatccatcctgcttttttccaccagcagcctgaacatgacctggacgaccatcaatattgttgaagccgtggtcggggcagtgctgctacgtaaattgctgccgtggtataaccccttgcaaaatctggctgactggctgcgtctggcactcggcagcgccattgttccgcctctgttggggggtgttctggttgtcctgctgacgcccggagacgatcctctcagggcatttttgatatgggtactgagtgaatccatcggcgctctggcactggtgccgctgggattgttatttaaaccacactatctgctgcgccatcgcaacccacggttgctttttgagagcctgctcacgttagccatcacactgacgttaagctggcttagcatgctgtatctgccgtggccttttactttcattattgtgctgttgatgtggagcgccgtgcgtctgccacgaatggaagcctttttgatcttccttaccacggtgatgatggtgagcctgatgatggccgcggatccccccctgcttgctacgccgcgtacgtacctgatgagccatatgccgtggctaccgtttttgctgatcctgctgcccgccaacatcatgaccatggtgatgtatgcctttcgtgcggaacgcaaacacatttccgaaagcgaaacccactttcggaacgcgatggaatattccgctatcggtatggcgttagtgggcaccgagggacaatggctgcaaaccaacaaagcgctctgccagtttctcgggtacagtcaggaagagctgcgcggactcacctttcagcaactgacctggccggaggatctcaataaagatctccaacaggttgaaaagctgataagcggtgaaataaacacctatagtatggaaaaacgctactacaaccgcaatggcgatgttgtctgggcgttgcttgccgtcagtctggtgcgccacacggatggcacgccgctctattttatcgctcagattgaagacattaacgagctaaaacgcaccgaacaggtcaatcagcaactgatggagcgcatcactctggctaacgaagcgggcgggattggcatctgggagtgggagttgaagccgaatatttttagctgggataagcggatgttcgagctgtatgaaattcctccacatatcaaaccgaactggcaggtgtggtacgagtgcgtgctgccggaagatcgccagcatgccgaaaaagtgattcgtgatagcttgcaaagtcgcagcccctttaaactggaatttcgcattaccgtaaaagacggtattcgccatatccgcgccctcgccaaccgggtactgaataaagaaggcgaagtcgaacgtctcctcggcatcaatatggatatgaccgaagtgaaacagcttaacgaggcattgtttcaggaaaaagagcgcctgcacattacgcttgattccatcggtgaagccgtggtctgtattgatatggcgatgaaaattacctttatgaatccagtggcggagaagatgagcggctggacgcaggaagaagcgttaggtgttccgctcctgacggtgttgcatattacttttggcgacaacggaccattaatggagaacatttacagtgccgacaccagtcgttccgcgatcgagcaagatgtggtgttgcactgtcggagcggcggcagttacgacgtgcattacagtattacgccgttaagtactctggacggcagcaatattggtagcgttctggtgattcaggacgttaccgaaagtcgcaaaatgctgcgccagctgagctacagcgcctcccatgatgcactgacgcatctcgccaaccgcgccagttttgagaaacaactgcgtatcctgctgcaaacggtaaacagtacacatcagcgacatgccctggtgtttatcgatcttgatcgctttaaagcggtgaatgacagcgccgggcatgcggcgggtgacgctttgctgcgcgaactggcgagcttaatgctgagtatgctgcgttccagcgacgtgctggcgcgactcggtggggatgaatttggtctgctgctaccagactgtaatgttgaaagcgcgcgttttatcgctacacgcattatcagtgccgtgaatgactatcactttatatgggaaggccgtgtgcatcgggtaggtgccagtgccgggattaccttgattgatgacaacaatcatcaggcggcagaagtgatgagccaggctgatatcgcctgttatgcctccaaaaatggtggccggggccgggtgacggtttacgaaccgcagcaagctgccgcacatagcgaacgggcggcgatgagccttgatgaacagtggcggatgattaaagagaatcagttgatgatgctcgcccacggtgtcgctagcccacggatcccggaagcgcgtaatttgtggctgattagtcttaagctctggagttgcgaaggcgagattattgatgaacaaacatttcgtcgtagcttcagcgatccggcgcttagccatgctcttgaccgccgggtattccacgaatttttccagcaggccgcaaaagcggttgccagtaaaggcataagcatctccctccccctttccgttgccggtttgagtagcgccacgctggtgaatgatctgcttgagcagctggaaaatagccctctaccaccacggttattacatctgattattccggctgaagcgattttagatcacgcagaaagcgtgcaaaaactgcggctggcgggatgtcggatagtgctcagccaggtgggccgcgatctgcaaatcttcaacagcctgaaagcgaatatggcagattacctgctacttgatggtgagttatgcgccaacgtgcagggtaatttgatggatgagatgctgattacgattattcaggggcacgctcagcgactcgggatgaaaaccatcgccgggccagtcgttttacccttagtgatggatacgctttctggcatcggcgtcgatctgatttatggtgaggtgattgccgatgcccaaccgctggatttgctggtgaatagtagttatttcgcgattaactgaggcgtgcttccccatcgcctgatgcgacgctaacgcgtcttatcatgcctacaaatcgctcattccccaggccggataaggcgctcgcaccgcatccggcgaccaacgtcatgcttcgtctggttgccagccttccgtataccagatatgcaacagcgcataagaacgccagggcttccagcgctcggcataacggcggatttgcgccggtgtcattcccggaaatcgctgtttaatcagataatcatccggcaggaaaacatctttcgcctgccagccacgcaaagcaaaataattcgccgtccagcgcccgatacccggaaaagtttgcagcgttttcatcgcctgctccacatcgcccggtattgtcattggtaaggtgccctccagcgccgcatttgccagatgaatcagcgcctctgcccgtttcaacggcatacctaacgcttttaatgcctgcgggtctgctgctgccagccgctgaggcgtcgggaagcagatatactccggaaaatcatccagccgttcgccataaagctgtgccactctggcggtcaattttgccgccatcgccacgctcaccagttggcctaaaatcgcccgcacgccctgctcaaaagcatcaacacagccgggtaaacgcaatccgggccgcgccgcgcctaacctgcccaacgcaccgttaacaatttgtgggttacattgcagatcaaacaggcggctcattttcgccagacactctgcggcaacaggttctaaacctgcacttaaatttatgtgcagagtatggcgggctatatccggaatagcagtcaccacgccgcgatattcgcccaccgccagactacgggcataataactgtccgcgaccgtttccacactgctcaccgcacgggcggcgagaaatcccaacatccagctccagtcatacggcggctgccagttcagggtatacatcgcatctccttattcatccgctttcagcataaacgttattcagacgctgcgctttgctttcatattccggttgtcgcgacggcaacatttcgctaaagtcacgccccttcttcaccggcatggggattatttcgtgtttattggttttgattacggtacagcaaactgtagtgtggcggtcatgcgtgacggtaaaccgcatttgctaaaaatggaaaacgacagcacgctgctgcctagtatgctttgcgcgccaacgcgtgaagcggtaagcgaatggctgtaccgccatcatgatgttccggcagacgacgatgaaacgcaggcgctgttacgtcgggcgattcgttataaccgcgaagaagatatcgatgttacggcgaaaagcgtgcagttcggtctttccagtctggcacagtacattgatgatccagaagaagtgtggtttgtgaaaagtccaaaaagcttcctcggtgccagcggcttaaaaccgcagcaggtagcgctgtttgaggatctggtctgcgcaatgatgttgcacattcgccagcaggcgcaggcacagctgccagaagcgattactcaggcggtgattggtcgtccgatcaacttccaggggctgggcggtgatgaagcaaacacccaggcgcaagggattctggaacgcgcggcgaagcgtgccggattcagggacgtggtattccagtacgagccggtcgcggctgggctggattacgaagccaccttgcaggaagaaaaacgggtgctggtggtggatatcggcggtggtacgactgactgtagtttgctgctgatggggccgcagtggcgtagccgtctcgatcgtgaagccagcctgctgggtcacagtggttgccgtattggcggtaacgatctggatatcgcgctggcgtttaaaaacctgatgccactgctgggtatgggtggcgaaaccgaaaaaggcatcgccctgccgatcctgccgtggtggaatgcggttgccatcaacgacgtacctgcgcagagtgatttctacagtagtgccaacggtcgtctgcttaacgatctggtacgcgatgcccgcgaaccggaaaaagtggccctgttacagaaagtctggcgtcagcgtttaagctatcgcctggtgcgtagcgcagaagagtgcaaaattgctcttagtagcgtagcggaaacccgcgccagtctgccgtttatcagcaatgaactggctacgctgattagccagcgagggctggaaagcgccctcagccagccactgacgcggattctggaacaggtgcaactggccctggataacgcccaggaaaaaccggacgttatctacctgaccggcggtagcgcccgttctccgctgattaaaaaagcgctggcagaacagttgccgggcattccgattgcaggcggcgatgactttggctccgtcaccgccgggctggcacgctgggcggaagtggtgtttcgttaattgaaaaatggctcagcagcggcttaaatctgcctgcgcctgagccagtttttctgctgcctgacgtaacggttccatcaacggcatggtccgtgctggagcatgaaggcggaatcgctgcaactctgtcgcgccgactgtcaacgcgctttccagccgatgtcgtttggcggtcattttcgccattaccgcttgtctgtctgctggcgttatcgcttcattcggcctgaacacaaaacggcgttcacagctcgctttccagtcgataaccgcctgggtcagatggtcgccaaaccctttcacttgcttaacgccacgacgggtaacatctgcggctgtttcaataccaaaagaccgtaacgccgctttacgcgcagggccaacgccgggaatagaggcaacatcaataaaaaatccctccagaaacttctgcttctgccgttcccttgcagtgtcatgaagtgctgccagagcgcgtttctcttcttccggtaacccgagaatttcgtccttcattttttcgagcatcgtccgtttggcgataaaaccttccaggccgcctacctgctggatctggcggactaaatggtcatagtccattttcgcacgattaaatgcctcacggcgttgctgaacttctgctttgtacgctttgcttgtcagactgccaataatccagatagccgccagcacaggaaccaaaataatataacgcggttctgcctgaaggccgcaaagcagcaggcttaatgcactcagtgcgatctcaagcagaatgatgtattcgcgccgtaacaggcctaaaggaagcggcctgccagtcggttggaaatgatcgggtaatggcagttgcaatgctggcggtgctacactcgccatcaccatcgcccagactttcgccagcacaaaattcccgccggtggtaatgacctcttcgccgagatcaataaaatagataacaccttgattatccagcgcacaccacgggcagtcagtcaaatgagcggggtaaacatgcattgcactaacgatacatttctttaactgttggcgtagagagtccagtgccgctacccacgctttagccgtcggacgcccggttgccacgccactttccgtgaatgcctgctgaaacatggcttcaacatcactcggtaacatgcttagcggaatagatcgtggcggcggttttaaaccacgtcgctgattatcactcgcgtaggcataacggaaatgggtaatatccgtctccagcgcattacccgcatcagagataagcggcacaccagaataaggatgccgcccaccaaacaagacgtgaaaaattagcaacgcaaggccaaaattatcgtgattttctgtgcgttcaaaaccgacaaaacttggcaaggtttgtagctctggcggcgtaaaatggctcacgccgacttcgcataaatgcagtgtgccattggcgttaatttgaaaggagtcgctatcaatcagtaccactttgctgtcgcgacctaccataaaactgttctggtttacgtcacccacgacgtgcccgtgctcgtgaaccgtagcaaaagaactagcaatattgcgcgcaacatagagtagaaaatcccacgcacaatgagggtaactctggcgacgatgtgccgggctatagatcatatgaatcggttctttaccagaaacttttggcatcataaaaccgataacttttccgcctcgtccaccgtgaagcgttgcctgcggccaggcgacataattcaacaactgcgcgtcagctgtcgcagccataaaggcaagtttgtcctgttttaaggcgggtggcggcgtgtgataaatcttggcgacgctatcgacaaactcctcgatatcataaaccgcgccttcaccacctttgcccagttcacggccaagagtggtcaattcacctgtgcttgtaaatacttttatatttgttttcataatatttcgcgggtagttatattatatttcaatgaataataacaactaaccattaaaattatttctatatggggaaaacccactcaagaataaaaatgataatgcaattttatcaggatacaattcaatttcggcctgataatgattaacttccacaggtttttgctaactttgactacaaagggattctggagaaaaaatgaaaaagatattacttatgttgagtctgctattttttactaccgcgggctttagtgaagttagcgatacgttagtgacgggaggttatgataaacaagcgatgtctgacgcgattaaacatgcgcggaaagaaaccgataaattcatcgaggttatgaataaaaaagatgccgatactttcgcagtcaaagccccgataaccgatcacggaagaaccgagcatttctggcttacggatgtcacttattctaacggcatgtttattggcgtaatcagcaatgaccctggtattgttacaaacgtagaatatggccaggagtggaaaatcaagaaagaagatattagtgactggatgtatacgcgcggggataaaatttacggcggttataccattgatcctttattggtcacctatccaaaagaagaagccgacgagctaagagcaaaattagttcgctaatcagccgttatatttattgtttaaactggcggttgaattgttgtcttcaaccgccatgagaaactcactctgcccacagcgccagtgccaacgttttatcatcatccgtacgctcgtttaccgccgggctggacaaaaactgctttaacaattcaggtaataaatcgagttgttcctgcgttgctgccgccagtccattgaaaaacggggtaaagaaaggcacatgaggagaattatccagcatatttaacgccagtcgctggataccatccgtaaatgctgcaactttgtgcgcacgcccagtgctggtgagagtttccagtctggaaacggcatcttcgtcggtaatgaagtgcgtcatgttggcatattcacccgccatcggcgtgagaggcaattgcagaccgtgacccaaatctaccaccacgccgccatcgccaatctgcataatcaaggtgccgtcagggctactaatcagtcccagaaatgtgcaggcaaaatcgcgaaccgctaattctttggcttccgcctcggcaaaaagtcgttgacgaatggtcagtaccatatttgtggcgaggacatcattaagccccaattccccgccctgcactttttggctcatataagccatcgcttcattgacggcgagcatcgcgccttcgccaccctggctgacactgcctgcgccatcagcgacaaatacgctcaataatggctgctggtcatttaaccaggcaatctgcatctggcaggcatcctgacaaggcaagtccgcgctgatgtggctcgttccaacggtacttgcatagaccagacgccagctcacacactcgtccagccttttggcgcttccagcacaacttccgttcccggcgtggagcgggaaacgctacgcaggctactggataaccagctaaacagttcacggaattgtaatccttgcagaggcaaaggctgacgaacgctaatttgtgccagcgtcttcatatccgccccctgaacaccgatggaaaagaaagcaaaccttttatcttcttccccccgaaacactttgttggctgcagcctgccactcatcggttggtgcaccatcggtaatcaggaaaatccacgggcgataatagctaataccatttgcacgatactcacgtttccgctcctctaccatatccagggctttggtaatggccgcacccattggtgtatcgccctgggcaaacaggatgggcggaaaaaaattagcggcgctggtaaagggttgttccacatgcaccgggccgaacgtcacaatgccgagttccactctttttaaagccagcggatcagcaagcagttcatcacgaaaggtaaccaatccggcgttaagttcattaataggtctaccgttcatagaaccagaaacatccagcagcaaaatgcaggggcaacgtggttccgggttactggcaaaatcgctggtggcaaacgtgatttgttcgctcataagaaatcctttcttagagaattatcgaggtccggtatcataccgactgcaataatgaaataagagcaaacgaagaaactttcagaattaggcccggcggcgcagaaaattttgctattcgcctcgcaagaacggagagccgtcgattgacactaagggcggagtgacataatttcaggagtgagggttagggagaggtttccccctccccctggtgttcttagtaagcctggaagctaatcactaagagtatcaccagtatgatgacgtgcttcatcataaccctttccttattaaaagccctcttctccgggagaggctttcccgtttcagcgtcccgctgaaatcatcggcttacctcctttcgccctgaatgcagtctatcgctaacgcgtgaataaaatagtttcctctgtgattattgcgtaacgactcgcaaagaatatttgctggcaggatcgcagactacaaagcctgcggattgacaatcttatcgtgaagacatactttcaggagtgagggtagagcggggtttcccccgccctggtagtcttagtaagcggggaagcttatgactaagagcaccacgatgatgagtagcttcatcatgaccctttccttatttatggccccttcctcgggaggggctttcccgtttcagcgtcccgctgaaatcgtcggcttacctcctttcgccatgcaagcagtctatcgctaacgcgtagataaaatagtttcctgtgttattactggatgcgtgctcgcaaatgtgcccgtcattcagacgattccagacagtgtttcataattcctccatttttctcccttattggctggctacactagtatcattccgcgaaacgtttcaggaagagaaactcttaacgatgaaaggtagttataaatcccgttgggtaatcgtaatcgtggtggttatcgccgccatcgccgcattctggttctggcaaggccgcaatgactcccggagtgcagccccaggggcgacgaaacaagcgcagcaaagcccagcgggtggtcgacgtggtatgcgttccggcccattagccccggttcaggcggcgaccgccgtagaacaggcagttccgcgttacctcaccgggcttggcaccattaccgccgctaataccgttacggtgcgcagccgcgtggacggccaactgatagcgttacatttccaggaaggccagcaggtcaaagcaggcgatttactggcagaaattgaccccagccagttcaaagttgcattagcacaagcccagggccaactggcaaaagataaagccacgcttgccaacgcccgccgtgacctggcgcgttatcaacaactggcaaaaaccaatctcgtttcccgccaggagctggatgcccaacaggcgctggtcagtgaaaccgaaggcaccattaaggctgatgaagcaagcgttgccagcgcgcagctgcaactcgactggagccggattaccgcaccagtcgatggtcgcgttggtctcaagcaggttgatgttggtaaccaaatctccagtggtgataccaccgggatcgtggtgatcacccagacgcatcctatcgatttagtctttaccctgccggaaagcgatatcgctaccgtagtgcaggcgcagaaagccggaaaaccgctggtggtagaagcctgggatcgcaccaacagcaagaaattaagtgaaggcacgctgttaagtctagataaccaaatcgatgccactaccggtacgattaaagtgaaagcacgctttaataatcaggatgatgcgctgtttcccaatcagtttgttaacgcgcgcatgttagtcgacaccgaacaaaacgccgtagtgatcccaacagccgccctgcaaatgggcaatgaaggccattttgtctgggtgctgaatagcgaaaacaaggtcagcaaacatctggtgacgccgggcattcaggacagtcagaaagtggtgatccgtgcaggtatttctgcgggcgatcgcgtggtgacagacggcattgatcgcctgaccgaaggggcgaaagtggaagtggtggaagcccagagcgccactactccggaagagaaagccaccagccgcgaatacgcgaaaaaaggagcacgctcctgatgcaggtgttacccccgagcagcacaggcggcccgagccgcctgtttattatgcgtcctgtggccaccacgctgctgatggtggcgatcttactcgccgggattatcggttatcgcgccctgcccgttagcgcgctgccggaagtggactatccgaccattcaggtggtcacgctctacccaggtgccagcccggatgtcatgacctctgccgttaccgcgccgctagaacgccagttcgggcagatgtctggcctgaaacagatgagcagccaaagttccggcggtgcgagtgttatcactttgcagttccagctaacattaccgctcgatgtcgccgagcaggaagtgcaggccgcgattaacgctgcgaccaacttgttgccgagcgatctgcctaacccgccggtttacagcaaagtgaacccggcagatccgccgatcatgacgctcgccgtcaccagtaccgccatgccgatgacgcaagtggaagatatggtggaaacccgcgtcgcgcagaaaatcagccagatttccggcgtcggcctggtgacgctttccggcggtcagcgtccggctgttcgcgtcaaacttaacgctcaggcgattgccgccctcggcctgaccagcgaaaccgtgcgcaccgccattaccggcgctaacgttaacagcgcaaaaggtagcctcgacggcccttcccgtgcggtcacgctttccgcgaacgaccagatgcaatccgccgaagagtatcgccagctaatcatcgcctaccagaacggcgcgccaattcgtctgggcgatgtcgcaactgtagagcaaggtgcagaaaacagctggctcggcgcgtgggcgaacaaagaacaggccattgtgatgaatgttcagcgccagcccggtgctaacattatctccaccgccgacagcattcggcagatgctgccacagctcactgagagtctgccgaaaagcgtgaaggtgacagtgctttccgatcgcaccaccaatatccgcgcatccgtcgatgatactcagtttgaattgatgatggctatcgcgctggtagtcatgattatctacctgtttttgcgcaatattccggcgaccatcattcccggtgttgctgtaccgctgagcttaatcggcactttcgcggttatggtgtttctcgattttagtatcaataacctgacactgatggcgttaactatcgccaccggattcgtggtcgatgacgccatcgtggtgatcgaaaacatttcccgctatatcgaaaaaggcgaaaaaccgttggcggcggcgctcaagggcgcaggtgaaatcggctttaccattatcagcctgaccttcagtctgattgcggtgttgatcccactgctgtttatgggcgatatcgtcgggcgactgttccgcgaatttgctattaccctggcggtagcgattttgatcagtgcggtggtgagcctgaccctgacaccgatgatgtgcgcgcggatgctcagccaggagagcttgcgtaaacagaaccgcttctcccgtgccagcgaaaaaatgttcgacaggataatcgccgcctatggtcgtggactggcgaaagtgctgaatcatccgtggctgaccttaagcgtggcactcagcacgctgctgcttagcgtgctgctgtgggtgttcattccgaaaggtttcttcccggtacaggacaatggcattattcagggcactttgcaggcaccgcaatccagctcctttgccaatatggcccagcgacaacgccaggtcgcggacgtgattttgcaggatccggcagtgcaaagcctgaccagttttgttggcgttgatggcactaacccgagcctgaacagtgcacgtttacaaatcaacctcaaaccgttggatgaacgtgatgatcgggtgcaaaaagtcatcgcccgtctgcaaacggcggtagataaagtgccgggcgtcgatctcttcctgcaaccaacgcaggatctgactattgatactcaggtcagccgcacccagtaccagtttaccttgcaggccacgagtctggatgcgctcagtacctgggtgccacagttgatggaaaaactccagcaactgccacagctttctgatgtctccagcgactggcaggacaaagggctggtggcgtatgtcaatgttgatcgcgacagcgccagccgtctggggatcagcatggcggatgtcgataacgccctgtacaacgcgtttggtcagcggctgatttccactatttatactcaggccaaccagtatcgcgtggtgctggagcacaacaccgaaaataccccaggcctcgcggcgctggataccattcgcctgaccagcagcgacggcggcgtggtgccgctaagcagtattgccaaaattgagcagcgttttgcgccgctctccatcaaccatctggatcagttcccggtaacgaccatctcctttaacgtgccggataactatagcctgggcgatgcggtgcaggcgattatggacaccgaaaagacgctgaatctgccggtggatatcaccacgcagttccagggcagcaccctcgccttccagagcgcgctgggcagcactgtctggctgattgtcgcggcggtggtggcgatgtatatcgtgctcggcattctgtacgagagctttattcacccgatcaccattctcagcacgctacccaccgcaggggttggcgcactgctggcgttgctgattgctggtagcgaactggatgtgattgcgattatcggcattattttgctgatcggtatcgtgaagaagaacgccatcatgatgatcgacttcgcgctggctgctgagcgcgagcaaggcatgagcccgcgcgaggcaatctaccaggcttgtctgttgcgttttcgtccgatcctgatgaccactctggcggctctgcttggcgcgctgccgctgatgttgagtaccggggtcggcgcggaactgcgtcgtccgttaggtatcggcatggtcggcggtctgattgtcagccaggtgctgacgctgtttaccacgccggtgatttatttgctgttcgaccgcctggcattgtggaccaaaagccgctttgcccgtcatgaagaggaggcgtaagtgaagttttttgccctcttcatttaccgcccggtggcgacgattttactgagcgttgccattaccctgtgcggcatactgggcttccgtatgctgccggtcgccccgctgccgcaggtcgattttccggtgattatcgtcagcgccagcctgcccggtgcgagtccagaaacaatggcgtcttccgttgccacgccgctggagcgcagtcttgggcgcattgccggagtcagtgaaatgacctccagcagtagcctcggcagcacgcgtattattttgcagtttgattttgaccgggatatcaacggcgcagcgcgtgatgtgcaggcggcgatcaacgctgcacaaagtttgctgcccagtgggatgcccagccgcccgacctatcgcaaagcgaacccgagcgatgcgccaattatgatcctcacgctgacgtccgatacttatagccagggtgaactgtacgatttcgccagcacgcagctggctccgacgattagccaaatcgacggtgttggtgatgtcgatgtcggaggcagcagtctgcccgccgtacgcgtcgggctgaatccgcaggcgctgtttaatcagggcgtgagcctggacgacgtacgcaccgccgtcagcaatgccaacgtgcgtaaaccgcagggcgcgctggaagatggcactcaccgctggcagatccagaccaatgatgagctaaaaaccgccgctgaatatcagccgttgattattcactacaacaacggcggcgcggttcgtctgggcgatgtggcgacggtgaccgacagtgtgcaggatgtgcgcaacgccgggatgaccaacgccaaaccggctattttactgatgatccgcaaactgccggaagccaatattatccagacggttgacagcatccgggcaaaattaccggagttgcaggaaaccattccggcggcgattgatctgcaaattgcccaggatcgctcccccaccattcgcgccagcctggaagaagtcgagcaaacgctgattatcagcgtggcgctggtgattctggtggtgtttttattcctgcgcagcggtcgcgccactattattcccgccgttagcgtgccggttagcctgattggtacgtttgcggcgatgtacctgtgcggattcagtctcaataaccttagcttaatggcgctcaccatcgctactggtttcgtggtggatgacgccatcgtggtgctggaaaacattgcacgtcatctggaagcgggaatgaaaccgttgcaagccgcactgcaaggtactcgcgaagtcggttttacggtgctgagcatgagtctgagtctggtggcggtgttcctgccgctgctgttgatgggcggattgccgggccgactgttacgcgaatttgccgtgacgctttctgtcgccattggtataagcttgctggtttctctgacattaacgccaatgatgtgtggctggatgctgaaagccagcaagccgcgcgagcaaaagcgactgcgtggttttggtcgcatgttggtagccctgcaacaaggctacggcaagagtctaaaatgggtgctcaatcatacccgtctggtgggcgtggtgctgcttggcaccattgcgctgaatatctggctgtatatcagcatcccgaaaaccttcttcccggagcaggacactggcgtgttgatgggcgggattcaggcggatcagagtattagctttcaggcgatgcgcggtaagttgcaggatttcatgaaaattatccgtgacgatccggcagtggataatgtcaccggctttacaggcggtagccgagtgaacagcgggatgatgtttatcaccctcaagccacgcgacgaacgcagcgaaacggcgcagcaaattatcgaccgtctgcgcgtaaaactggcgaaagaaccgggggcgaatctgttcctgatggcggtacaggatattcgcgttggtgggcgtcagagcaacgccagctaccagtacacgttgttatccgacgacctggcggcactgcgagaatgggagccgaaaatccgcaaaaaactggcgacgttgccggaactggcggacgtgaactccgatcagcaggataacggcgcggagatgaatctggtttacgaccgcgacaccatggcacggctgggaatcgacgtacaagccgccaacagtctgttaaataacgccttcggtcagcggcaaatcagcaccatttaccagccgatgaaccagtataaagtggtgatggaagtggatccgcgctatacccaggacatcagtgcgctggaaaaaatgttcgttatcaataacgaaggcaaagcgatcccgctgagctatttcgctaaatggcaaccggcgaatgccccactaagcgtgaatcatcagggattaagcgcggccagcaccattagctttaacctgccgaccggaaaaagcctcagcgacgccagtgcggcgatcgatcgcgcaatgacccagcttggtgtgcctagcacggtgcgcggcagttttgccggcacggcgcaggtgttccaggagacgatgaacagccaggtgatcctgattatcgccgccatcgccacggtgtatatcgtgctgggtatcctttacgagagttacgtacatccgctgacgattctctccaccctgcccagcgcgggcgttggagcgctgttggcgctggagctgttcaatgccccgttcagcctaatcgccctgatagggatcatgctattaatcggcatcgtgaagaaaaacgccattatgatggtcgattttgcgcttgaagcccaacggcacggtaacctgacgccgcaggaagctattttccaggcctgtctgctgcgttttcgcccgattatgatgactaccctggcggcgctgtttggtgcgctgccgctggtattgagcggcggcgacggcagcgagctgcggcaacccctggggatcaccattgtcggcggactggtaatgagccagctccttacgctgtataccacgccggtggtgtatctctttttcgaccgtctgcggctgcgttttagccgtaaacctaaacaaacggtaaccgagtaaatgacagatcttcccgacagcacccgttggcaattgtggattgtggctttcggcttctttatgcagagcctggacaccaccatcgtaaacaccgcccttcccagtatggcgcaaagcctcggggaaagtccgttgcatatgcacatggtcattgtctcttatgtgctgaccgtggcggtgatgctgcccgccagcggctggctggcggacaaagtcggcgtgcgcaatattttctttaccgccatcgtgctgtttactctcggtagtctgttttgcgcgctttccggcacgctgaacgaactgttgctggcacgcgcgttacagggcgttggcggcgcgatgatggtgccggtcggcagattgacggtgatgaaaatcgtaccgcgcgagcaatatatggcggcgatgacctttgtcacgttacccggtcaggtcggtccgctgctcggtccggcgctcggcggtctgctggtggagtacgcaagctggcactggatctttttgatcaacattccggtggggattatcggtgcgatcgccacattgctgttaatgccgaactacaccatgcagacgcggcgctttgatctctccggatttttattgctggcggttggcatggcggtattaaccctggcgctggacggcagtaaaggtacaggtttaagcccgctgacgattgcaggcctggtcgcagttggcgtggtggcactggtgctttatctgctgcacgccagaaataacaaccgtgccctgttcagtctgaaactgttccgtactcgtacctttagcctgggcctggcggggagctttgccggacgtattggcagtggcatgttgccctttatgacaccggttttcctgcaaattggcctcggtttcagcccgtttcatgccggactgatgatgatcccgatggtgcttggcagcatgggaatgaagcgaattgtggtacaggtggtgaatcgctttggttatcgtcgggtactggtagcgaccacgctgggtctgagcctggtcaccctgttgtttatgactaccgccctgctgggctggtactacgttttgccgttcgtcctgtttttacaagggatggtcaacagcacgcgtttctcctccatgaacaccctgacgctgaaagatctcccggacaatctggcgagcagcggcaacagcctgctgagcatgattatgcaattgagcatgagtatcggcgtcactatcgccgggctgttgctgggactttttggtagtcagcatgtcagcgtcgacagcggcaccacacaaaccgtctttatgtacacctggcttagcatggcgttgatcatcgcccttccggcgttcatctttgccagagtgccgaacgatacgcatcaaaatgtagctattagccggcgaaaaaggagcgcgcaatgaagttctggcgacccggtattaccggcaaactgtttctggcgattttcgccacctgcattgtcttgctgatcagtatgcactgggcggtgcgtatcagttttgagcgtggctttattgattacatcaagcatggtaatgaacagcgattacaactgttaagtgatgcgcttggcgagcagtatgcgcagcatggcaactggcgcttcctgcgcaacaatgatcgctttgtctttcagatcctgcgtagttttgaacacgataatagcgaagataaacccggcccgggtatgccaccgcacggctggcgtacccagttctgggtggttgatcaaaacaacaaagtgctggttggtccgcgagcgccgattccacctgacggtacacggcgacccattctggtcaacggtgcggaagttggcgcggtgatcgcctcccccgttgagcggttaacgcgcaatactgatatcaatttcgataaacaacagcggcaaaccagctggttgattgtcgccctggcaacgttactcgcggcacttgccacttttctgctggcgcgcggtttactggcaccggtaaaacgacttgtcgatggcacgcacaaactggcggcgggcgatttcactacccgcgtaacgcccaccagtgaagatgaactgggcaaactggcgcaagacttcaaccagcttgccagcacactggagaaaaaccagcaaatgcggcgcgattttatggccgatatttctcacgaactgcgtacgccattagcggtgctgcgcggtgaactggaagccattcaggatggcgtgcgtaaattcacgccggagacggtggcgtctttacaggcggaggtcggtacactgaccaaactggttgacgatctccatcagttgagcatgtctgatgaaggcgctctcgcctatcaaaaagcaccggtagatttgatcccactgctggaagtggcgggcggcgcatttcgcgaacgattcgccagtcgtggcctgaaactgcaattttccctgccagacagtattaccgtatttggcgatcgcgaccgtttaatgcagttattcaataacttactggaaaacagcctgcgctacactgacagcggcggcagcctgcaaatctctgccgggcagcgcgacaaaacggtgcgcctgacctttgccgacagtgcgccaggtgtcagtgacgatcagctacaaaaattgtttgaacgtttttatcgcaccgaaggttcccgcaaccgtgccagcggcggttccgggctggggctggcgatttgcctgaacattgttgaagcacataatggtcgcattattgctgcccatagcccttttggcggggtaagcattacagtagagttaccgctggaacgggatttacagagagaagtatgaccgagttaccaatcgacgaaaacacaccgcgtattttgatcgtggaagatgaaccgaagctggggcagttgctcattgattatctgcgtgctgcgagctatgcgccgacgcttatcagccacggcgatcaggtactgccgtatgtgcgccagacaccaccggatctgatcctgttagatctgatgctccctggcaccgatggcctgacgctgtgccgggaaattcgtcgtttttctgacattccgatcgtgatggtgacggcaaaaatcgaagagatcgatcgcctgctggggctggagattggcgcagatgattatatctgtaagccgtacagcccacgggaagtggtagcgcgcgtcaaaaccattttgcgccgttgcaaaccgcagcgcgagttgcagcaacaggatgctgaaagcccgttgattatcgacgaaggtcgttttcaggctagttggcgcggtaaaatgcttgacctgacgcctgcggaatttcgtctgctgaaaacgctctctcacgaaccaggaaaagtgttctcccgcgagcaattgctcaatcatctttatgacgactaccgcgtagtaaccgaccgcaccatcgacagccacattaaaaacctgcgccgcaagctggaatctctcgacgccgaacagagttttatccgcgccgtttatggcgtcggttaccgctgggaagccgacgcctgccgcatcgtttaattttagcgacattattttgttagccggagatggcgttcagaccagatccggcaacattatcccacgcatggtcagcaaactgacattatctctccgccctggcaggcatcagaaaatcgctcatactttaatcggtaaacagcacctttagaatcctgtcgtttgttttcgatttcaaaatataatgaaattatttgtttttaaatatcgagataacgatcacaaaaacgacaatatgaaaattattcgaggagtgaaaggcaaaaaaacggcctcccgatagggaagccgtagcaaagtgcgcgtgtttttatgccggatgcggtgtaaacatacgtggcagtgctatgtaggcatgataagacgcttcagcgtcgcatcaggcataggttgccggatgcagcgtaaacgccttatccgtcctacggggtggtgttgttcgtataaggcgtatcaggcgatagtaattttgctatcgagataaacgtcctgcacggcgttaatcagtttcacgccgtcagccatgcttttcttgaacgctttacgtccaagaatcagccccattccgcctgcgcgtttgttgataaccgcagtacgcactgcatcgctgaggtcagtttcaccgcccgcagcaccgccggagtttatcaacccagcccgacccatatagcagttagctaactgataacgcaccagatcaatcgggttttcgctggtcaatttgctgtaaacacgatcgtcggtgtaaccgtaattaattgctttatagccgccgttattttccgccattttttgtttgacgatatctgcaccgatggttgccgccagatggtttgcctgaccggtcaggtcggcggaaacatggtaatcaacgccatctttcttaaaggcggagttacgcaaataggcccacagcactgtcaccatacccagctcgtgcgcacgttcaaaagccgcagaaatttcttcaatctggcgacgactctcttcgctgccaaaatagatagtcgcaccaaccgcaaccgcgcccatgttgaacgcctgctccacgctggcatacagcgtttgatcgtaggtattcgggtaacttagcgtctcgttgtgattaagtttgacgaggaatggaatgcgatgcgcataacgccggcttacgctcgccagcacgccgtaagtactcgccacacagttacagcccgcttcgatcgccagttcaacaatgtttttcgggtcaaagtagagcgggttagcagcaaaactagctccggcagagtgctcaacgccctggtcaaccggcagaatagaaagatatcctgtgccagccagacgcccggtgttgtacaacgtctgcatattacgtaacaccgctggcgggcgattattgtcaatcattacgcggtctacgtagtcatgtccggggagataaagctggtcagaaggaattgtcatacaacggtgctgtaaaaggttgtcggcgtctttgccaagcaactgcgcaatatctgtcattactatgctcccgtaaattccgattggatatcggctatggattgtcctggcccgccttttgcgggcaatcataatcctggtcgttacgggcgagtttttccatcttttggatgttttttcagcgttttctgttggctcgattcatcagaaaaaatgttagcgcggtcaagttttcaccgcaaaggtatttaaaaggtattattaagtggtattgtcatcgcgtaccttacattacctgtcatgaaggaattaaaagatgaaaacaacagcaaagctgagcttcatgatgtttgttgaatggtttatctggggcgcgtggtttgtgccattgtggttgtggttaagtaaaagcggttttagtgccggagaaattggctggagctatgcctgtaccgccattgcggcgatcctgagcccaattctggttggctccatcactgaccgctttttcagcgcgcaaaaagtgctggcggtattgatgttcgcaggcgcgctgctgatgtatttcgctgcgcaacagaccacttttgccgggttcttcccgttactgctggcctacagcctaacctatatgccgaccattgcgctgactaacagcatcgcttttgccaacgtgccggatgttgagcgtgatttcccgcgcattcgtgtgatgggcactatcggctggattgcctccggtctggcatgtggtttcttgccgcaaatactggggtatgccgatatcagtccgactaacatcccgctgctgattaccgccggaagttctgctctgctcggtgtgtttgcgtttttcctgcccgacacgccaccaaaaagcaccggcaaaatggatattaaagtcatgctcggcctggatgcgctgatcctgctgcgcgataaaaacttcctcgtctttttcttctgtagtttcctgtttgcgatgccactagcgttctattacatctttgccaacggttatctgaccgaagttggcatgaaaaacgccaccggctggatgacgctcggccagttctctgaaatcttctttatgctggcattgccgtttttcactaaacgctttggtatcaaaaaggtattattgcttggtctggtcaccgctgcgatccgctatggcttctttatttacggtagtgcggatgaatatttcacctacgcgttactgttcctcggtattttgcttcacggcgtaagttacgatttttactacgttaccgcttacatctatgtcgataaaaaagcccccgtgcatatgcgtaccgctgcgcaggggctgatcacgctctgctgccagggcttcggcagtttgctcggctatcgtcttggcggtgtgatgatggaaaagatgttcgcttatcaggaaccggtaaacggactgactttcaactggtccgggatgtggactttcggcgcggtgatgattgccattatcgccgtgctgttcatgatttttttccgcgaatccgacaacgaaattacggctatcaaggtcgatgatcgcgatattgcgttgacacaaggggaagttaaatgaaaacagaacgtattctcggtgctctttatgggcaggcgttaggggatgcgatggggatgccctccgagctttggccacgcagccgcgttaaagcacactttggctggattgaccgttttcttcctggaccaaaggagaataacgcggcctgttattttaaccgcgccgaattcaccgacgataccagcatggcgctgtgtctggcggatgcgttactggaacgtgaaggcaagatcgatccggatctgattgggcgtaatattctcgactgggcgctgcgtttcgacgcctttaacaaaaacgtactaggtccgaccagcaagattgcgcttaacgccattcgcgacggtaaacccgttgctgaactggaaaacaacggcgtgaccaacggcgcagcgatgcgcgtcagcccattaggttgtttgcttccggcgcgtgatgttgattcctttattgatgatgtagcgctggcgtccagcccgacccataaatccgatctggcggttgcaggcgcggtagtcatcgcatgggcgatttctcgtgccattgacggagaaagctggagtgcgattgttgattccctgcctagtattgcgcgacatgcacagcaaaaacgcatcactacgttcagcgccagtctggcggcgcggctggagattgcgctgaaaattgtgcgcaatgccgacggcaccgaatccgccagcgaacagctttaccaggtcgttggcgcaggtaccagcactattgagtccgttccgtgcgccattgcgctggttgaactggcacaaaccgacccgaatcgctgcgccgtcctgtgcgctaaccttggcggcgacacagacaccatcggtgctatggcgacggcaatttgcggcgcgttgcatggcgttaacgctatcgatcctgcgttaaaggcggaactggatgcggtaaatcagcttgatttcaaccgctatgccacagcgctggcgaaatatcgtcaacaacgggaggcggtatgagcggcgctcgattacacacgctgctgcctgaattaaccacgcgtcagagcgtgatggtcgtcggcgcggcggtcattgacgtgatcgccgacgcttatgccctcccctggcgtgggtgcgatatcgaactgaaacagcagagcgttaacgttggcggctgcgcactgaatattgccgtggcgttaaagcgcctcggcatcgaagcgggtaatgccttgccgctcggtcagggcgtgtgggcggagatgattcgcaaccggatggcaaaagagggcttaatcagcctgatcgataacgccgaaggtgataacggctggtgtctggcgctggttgagccggatggcgaacgcacttttatgagtttcagcggtgttgaaaatcagtggaatcgccagtggctggcgcgattaaccgttgcgcctggcagcctgctctatttttccggttatcaactggccagcccctgcggcgaattgttagtggaatggctggaagagctgcaagacgtgacgccgtttatcgattttggcccacgtattggcgatatcccggatgcattactggcgcggatcatggcctgtcgacctttagtgagcctcaatcgtcaagaggctgagattgccgccgaacgttttgctttatccgcagagataacaacacttggcaagcaatggcaggagaaatttgccgcgccgttgatcgttcgtctcgataaagaaggcgcatggtatttcagcaacgacgcttctggctgcattccggcatttccaacgcaagttgtcgacaccattggggcgggcgacagtcatgccggtggcgtacttgccgggctggcctctggtctgccactggcggatgccgtattactgggcaatgcagtggcgagctgggttgtcgggcatcggggcggtgattgtgcgccaacgcgcgaggaactactcctcgcacacaaaaacgtataattactcctcgcacacaaaaacgtatagatcgctgcgacagtggctaatgctgtactcaataggccgttgctgttggtcaagcgccacttgcttgatcaccagcaccggtattttgctatctaactgaatatgactctgaaactcggcatccggcatccgggcgctaacgcgggaacgcgtacgttgtgggtaaatgtgctggctgcggaaatagtcataaagactaatcccgatggcatcaacatcatgaattaaatgcgccggaacccagctttcctcaatgcttaccgcttcttcatcgacatagcgaatacgcttaagcaaaaagacatcacttcctgcttcgaccgccagctgctgcgcgacttcttcgggacatttcacgacacgcttgttaacccatagcgtatcgggctttttcccgcgcaataccacctgctgagaaaaacctcgcgcttctttcaagctgtattcgaagatgttgttgatctgcgtgccgtaaccgcggctacgcgtcaccacaccctcttcttccagcgcctgcatcgccttgcgcaccgtaatgcggctaacgccggttaactgacttaaatcacgttcaccgggcaaaatattgccatgctccagcaccccgctgcgcacggcattttttaccgtttcggcaaacttaatataaagcggcgtgttatccgccgctaaaatacgctcgttcagttgggcaatcagctgggtatgcgcttgttccatttgtctttttcctgccggggagtctggtgggagtatatcactgcttcttatttaaggcgtttctttaatcccatcaacgaatgcctgcaactcctccaccgtgccattaaatacattaaaatccaccggaccattgatgccatctacctgtccacggtcggaatgctgccagaagcgccaggccattccgtcattgtccggacgacgttgatagtagtgagccacccaccacggatattcattgaaatagcccgccagattggtgtgataaaaaacggctccactgtaaataatcggctttttccccgtacttttttcgaccatttttagccactgacttacccgcttgcgtaattcttttgcgcttaattttccccgttcttctacgtccagcacggcagggaaatcgccttgactgaaatccaccgtttgcagaaataatctcgcctgaacactagcggatacgctcggggagaaataatgatacgccccacgcagcaggccattttcgcggcttagttgccagttacggctaaaataggggtccaccagcttttcgccttccgtcgccttaataaaagcaaactgtaagcggataccattgtcgcgcatttttgccacccgctgccagtcgatccgctcctgccagcggctaacatctattccgtgaatggtgtaactggcaggaatgcgaatagcgaaagatttaaccgggcgataaccgtagaagtggatgtagtctgtaatctgaactgctgtgctatagaaaaaattcaccgtctgacgcggataaattgcaacgatggaaattagcccaagagcgcataatagagaggtgagtttttttcgactggtaattcttagctgcattggtttcatccctgaatgtcagtgccaaaggctgacaataaccaaagcagctatagtacggcgctcaccaccaggcgtggaagtggtgaaccggaccaataccgtgaccaacttccagcgtgtcggcctgggctaacgcgctactaagccagctttttgcctcctgtacggtgtcagcccagtttgtatggcgcgggcgtagtgcagccaacgccgcagagagtgtacaaccagtgccgtgggtgtttttggtcataatgcgcggtgcggtaaaccgttgttcaccctcgcgggtaaacagccagtccgggctttgctcatcatccagatgaccacctttcattagcactgcgccacagcccatcgccaacaggcttcgcccttgttccagcatttcctgttcggtgcgcgcgtgtggcgcgtcgagcaaggcggcagcttcgggcaagtttggcgttattaaactaacctgtggcaataatcgactgcgcagcgtagcaaccgcgctaggactaagcagcgggtcgccgctttttgccagcataacggtgtcgagtaccacgttttggatctgataacgttgcaaccgttctgccaccgcttcaacaatatcggtttccgccagcataccgattttagtggtatcgattcgcacatcgctgaacacgctatcgagctgggcggcgacaaaatcaggctcaatgcgatacacgctctgtacgccacgggtattttgcgccaccagtgcagtaataacactgcaaccataagcgccaagtgcgctgaaggttttaagatcggcctgaatccccgcaccaccactcggatcagtaccggcaatcgtcagagcgttaattcgtttcatgcctgcacctcctgcgtcaattgccagagcgcatcaaggaaatgtggaacaaaactgcctggcccctcgcttctggcgactgcgcgttctccggcttgtttcatccagtgacaggcagatgcgacattttccagcgtatcgcctggtaacgcacagcaggcagcgacaaccgcgcttaatgcacagccagttcctaccactttggtcattaacggatcaccaccgtgaataccaatgatacgatgtccatcggtaacataatccatctcgccagtgaccacgacgattgcgccagtttcccgtgccagtgtttgtgcagcgggtatcgcgttagctgcggcgtcagtggtatccactccccgtccgccattagcaatgccagctaatgccatgatttcgctagcattaccacgtatcgctgccggtttaaaagataaaagttcatgacaaaaatggcggcgataatcgagcgcacccaccgctactggatcaagcgtccagggtgtttgagagctttttgcttgctcaacggcagcacgcatcgcctgagcgcgtggctgcgtcagtgtgccaacgttaatcaacaaggcactggcgatagccgcaaactgactggcctcttcggtttcgataaccatcgctgggcttgcaccgagcgccagcaaggtattggcggtaaaggtttgcaccacatcattggtcatgcagtgcacaagaggggaatgttggtgaaaaaggtgtaacgcgtgcgcagattgcgcactacccagcaggtcgacttgcatagtttgctcctgccataacgtgaagaagcaatgacctggtggtccgtgacttccctacgctggcattatccagatcaggtgatacgggtatttctcagccttcacgcagaagggcaccccgagtcgtttggttgcgatgataaatcgcagaggaggatggtaatgtccagcgcacgcgttgtaaacgaggaaaaacggcagttttacaatcgcgttaataaattatttgatataactatccagcaccttcagaacgacatccagatcttcttcacgttttagctcatccccctggtgaacgatgtgttccgtcagatgacctttaatcacttcccgcatcagaccgtttaccgcgccacggatagcagcaatctgttgtaaaactgcagcgcattcgtgcggctcgtcgagcattttcttgagcgccacgacctggccctgaatcttactggcacgcgctttcagtttctgtttatcacggattgtatgagacatggcaacacctggttaacaagaatatgaaaaatcatagcactattaatctactggggggtagtatcaggtactgggggggagtagaatcagattgccgaattaatactaagaattattatcatgaccgaatttacaactcttcttcagcaaggaaacgcctggttcttcatccccagcgccatcttacttggtgcgcttcatggcctggaaccagggcacagtaaaacgatgatggcggcgtttatcatcgccatcaaaggcaccattaaacaagcggtgatgctcggactggcagcaactattagccataccgcagtggtctggttaattgcctttggcgggatggtgatcagcaagcgctttactgctcaaagtgcagaaccgtggctccagctgatttccgcagtgatcattattagcaccgcgttctggatgttctggcgtacctggcgcggcgaacgcaactggctggagaatatgcacgggcatgattatgagcatcatcatcacgatcacgaacatcaccacgaccatggacatcatcaccatcacgaacatggcgagtatcaggatgcccatgcacgagcccatgccaatgacattaaacgacgctttgatggtagagaggtcaccaactggcaaattttgttatttggcttaaccggtggccttatcccctgcccggcagcaattaccgtgctgttgatatgcattcagttgaaagccctgacactgggcgcaacactggtcgtcagtttcagcattggcctggcgttaacgcttgtcaccgtaggcgttggcgcagcaatcagcgttcagcaggtcgcaaaacgctggagcggatttaacactctcgctaaacgcgccccctatttttccagtctgttgattggcttagtcggtgtgtatatgggcgtacatggcttcatgggcataatgcgataactcaatcctttaggcttgcatgttatcttcagcccaggatgattcttaaatcagctatttccgctgactctctgctcgctaaggatgcttttagggcatcctttcatttacactttttacgaaatcatgggatcactaacaaaatatcgcttgtcagttatattgtatggcaggaaagatatgcgactgatattacagatccccaaagtggagagtttatgaccattaaaaataagatgttgctgggtgcgcttttgctggttaccagtgccgcctgggccgcaccagccaccgcgggtagcaccaataccagcggaatttctaagtatgagttaagtagtttcattgctgactttaagcatttcaaaccaggggacaccgtaccagaaatgtaccgtaccgatgagtacaacattaagcagtggcagttgcgtaacctgcccgcgcctgatgccgggacgcactggacctatatgggtggcgcgtacgtgttgatcagcgacaccgacggtaaaatcattaaagcctacgacggtgagattttttatcatcgctaaaaaaagccccctcatcatgagggggaaatgcagacaccttgttattttttattattagccacttgctcgtcttgcttgttattagtcgtatttcacgttgattaatgcggttgcctccagtgcgccagatttaactttgtttgtatcgtagacgtagtaactggctgttatcggaatactaaccgttgtatctgtaagtttactcttcgccgcaacttcctttaaatttgtatatcctttactgctgttagtgatatttaaaagtgtgactgggctaccattactttcaagaataaatcctacgccattatcttccgcacctttcagtattgtgttgctgttggttaacaagtcagaactacttaaatacacctgcattttccgacttgtttgattttgttgacctaataaatttttacaacgcagaataatatccccttgtttactatttattgttgctttgttacctgtggctggtaattgactaacgggaatactgtctaaagtaattaataaatcgtccggtttgcaggttgtggttatcgggttgtaactcaatgtcagattaaaggaatagacacctgcattttgtgccaatgcatttctgtagctatttacacatgcatcccaactcttgccacctaataaacacagtagaaattgtactgcggcactcccgcgtgtgctactactagcactggataatgtcgcaacaccattaatcatcacactaccgccgccccccgcagaaacattcacttttgcattactggccgcaggtgtcaccgtaacactataaccactggtgaaactggtctgattattactcaacgtgatgttgtttttattggtccattcaaaatgtaaatttaattttatggtatcgttataaagtccaacaataatatcgctcgggctcataggggtgatagtatttgtacttacgcaactgctatcattaaaattatgctcatatgtcgccatttgtgtttgagtaagtgcaaaatccccctgaacaaccaagttgtgctgaacagataactcactataacatgccgcatagctcacaggcataaccatcatcattaatataaatagcattatgcgaatttccatagaaccacctgactattactggcaaatataatttctactttcatcaatctctttaccgaaggtgattgtgcaactaagtccttgttgcttatcaattgccacattaacgcttggcggtacttcattggtgcgaataaataactgacttccctggccgacaacgccaatattatgaccatggatatcattgacttcataaccaaacgttaaactttgcccatctgctcttaacgcttttataaaccatggcttgcgctgatcggtatcaaaattaaccagtacaaccgcgccgcgataaggggcggcaattttccggttgccacgtaattctgcttcgctatcgctttggctcacatccagcatcaggtgattttcccgataaggtgtcattccgtcgtatatcaccactccattacggtttgttgtgcgatatttttgcccattgacataagcatctttaattcctggcgcattcatcacagcaaacgtttcggaaagacggttcgccagattaacgccaccgctccaggcgacaatgcccccactaacactggctccagcctgtcgataagtactgctctgactataactgccattcactgtcgcaaccggcgcgttccaggtcaaattcgccccagctgtcgtttcatttccctgatgttgatgactcaggttgacaccataattgaactgatcccgactccctactgttccacttaatcccgtattattactggcaaacccctgatcatcaaacgtcgtactgttagacatatatatttgccgacgaggcgtgctaacgtcatcaccccaatcaaagggaatgcttataaaaatattaaaacgtttctcttcatgatgattctcgtcataagcctggcttgccgcgagggtatagcttatccgtcgcaggttgttggaataactcaactgataatccttactactgccgctacgcccccagtaatctcgccataacgtacttaaactcacagacccccaaccttctggcaaactctggctcatattggcggaaaagctatttttgcggccaaaatcgttctggtaataatcggcaatgtcatagacatcgttttcatcacggcgataattatctttattgtttgcccaaacgtgatcgttaaatgtccggtaatcacggctgctataacgccaggccgccagaccaaaacgcgtgctcgtttggctcacaaacttgttgtaggcaatttgataactttgcccgtcaaacacatcgccgttgtcttgtttactatggctcttagtggcatcgacggaaatggcaccaatgcgtgtattccagccagcccccaaagtaaacgcgtaataattattcgcgaccatgctgccaccatacagcgtcaataaattattaaaaccatactgataacccgcctggacaaaatcactttgtttgctcgccccttcaatatggctacgacccgccgctaaatcatatttgctcacgccgggttgcagcatatttggcaccgctgcataaggcaccagataggtggttacgctgccgtccgcctctttcacgctgacatcaagatctgctccaccaccggccaactgcaaatctgtaatcgcgaacgggccaggaggaacctctttctgataaaccacaaaaccattctgttcaatagttaccagcgcgttactctgagcaatcccctgcacccgtggcgtaaaattttgtttgctgttaggcaacatctgcatatcacgaaacaaccgcacacctctgaagcgaacagaatcaaaaatatcgctacttgtgtacatatcacccacgcgaagcgtgccgagaagttgggcaaatccacgttccagatacagggtattgcttttccacacccctggattgttatttgttttactgaaactggcatcagaatgcagttgccaccccagtaaatttaacccgctgttaaaacgtacatatgtactcttgttattaccgctcgctttatagtcgctgtaatactgactcagataataagaggtataaaacgcattaataccccgctcccagttttccggtggaacatagccactttccagttcttccacccaggcctgcgggacactgaaatcgagacgaaaaaccccgatatcccaggtatagctcccaccctgaacaagttgctcaaatgttaaacattgcttaccgctggcgaagttatcgctattaatgcctaaccgcttgataacttctctacttaaacatgtttcttgcgggttgtctttaacaataatctcatatttcccgcgccattgcttattgacataaatatcgatgtcatactgccccggtaagggttgattatcatcaagacgaatatttgcaacctgctggtctttcattccacctatcataaaatgggtatcaaaggtttcttcagctgcataagcttcaatgccgagcaataacgctacgattgcacttgcaagtggggtcattctcaacataggcagctcctgcaattaaattttgtcactaatatagttgccatggtcatcgataatggtcagatgccagttatttgcattattacttttgacattaacactctgactttctaagggggcaatcataatagtttcataattgactttgacattattagctttgacatcgctaatcgtcacccaattagcactgtcattttttatcaccaaaccattgccactgcgatttaccagcaattttttaaatgtcgctttatttaccggagcaatacccgctggccggtaaaacaacttaattctgttttgcatcgcaaacttcagtgcattcttaccttcttgctctggactatttggtggaatatccagaacattcagataaaaaatgctttctttattagtgggcagtttattcggcataattttgatttttacttgctgcccggaatttgcccctatttttgccactggtggcgttaacatgaaaggaacctgaattttttctggtggtaaactcgtatcgccatcatcaatccacgcctgcagcaggctagaacggtttccctggttcatcaactgcaccatcacttctttattttctgccgggtaaataatgcgcgtcccgtagataacaattccggcatgtgcaggaaggaccatagaaaaaatgagtaaagataataatcctttcattttaatgcctcttaaattaaaaggccgccatgggatagcggccatgtttattacctggagaaacttacaattttatttattaatcctgcgccacacgcataaccagagaagataacacatcaccactttgcacactgttatctgtcagtttcaggtattttgctttaaacggaatagcatattgaccttccgctgttttataactctcaatgttaaaaggtgcagaaacatccaggacatcgctgttatcacctaaatagagatagtaacccacggtatcgttgctactggctatcgccttatcgttaccggttattttatcgttggtaatcaagctgagttttacaccagcaacttctttcgggcagctaatttttaacatgctgctggttacaccgactgcatcatcataggtagaatatttagctttaccttcaaagacactggttggtacagtcggcatattaatacttacactatcaccacccgcttcgaatttacacggagattctgcaatattccccttaatagttaatgttccggtatcaacgtctgcagcaaatactccagcgctcataaaaaaagaagaaaagacagcggcagcaataatactacgtttcataatatgttccttaataaaatttatttttggttgttaagagtctgtatctcttggaaacaaatttctcacatcaaaaaagttgccgcaatgtaaacacattgttttattgatttaaaacaaattaaccattgcaatataaatacaaaaaatatttaagagtattaactatttatcgcatctatcaattaatgtagatttatgtaaatggtattgttgatatcaataaaaaagccgaaatcatttatataaatgatttcggctttctaaatgcaattaaaatcaggttgccaaattaatcgtagcgatttaacacgattcgacgtttgctatcgctacctgcaacaaccacttctgtcgttacacctttgacggggctagaaaacagatgacgggtgtcaacattatacgttaactgaccacaatgctgttgaggttgaccattaaccatagccatactgcatgttgggggactgatcctgccattaatcgctaatgtggcagtctcactagagaatgcgggagaagccaatccataggcaagaaaaataattccactcagccaatacttattcattgaacgttatccctgtagtaaaggttatgcctggatagaatgagtgcataacaaactatagctgtacatccactacacagccacgaaggatgataatgaagcattgcctgtatgatcaatcgactttgtagagtttcggacgaaggtccgcagaatattcgcagtattaaataagtgttcattaatgcggcaaaaactaatacaccgcatcaatgtaacatctctgcggtgtatgaagaataaccagaatggttaataggcgttagaccgcgcggaaggaaatctcgcctggaatgacttcaccctgccagtagagctgagctgcaacgcggtcagccagctggcggtagatagcggtaaattcgctctccggacggctgataaccgttggcgtacctttatcgagatcctcacgtaaggagatgtgtaacggcatctgccccagcagctgtgtatggtatttttcagccagtttctctgcaccaccggtaccgaaaatcggttcatggtgaccacagttactgcaaatatgcacactcatgttctcgacaataccgagcaccggaacctcgactttctcgaacatcacaatgccttttttcgcatcgatcagcgcgatgtcctgcggggtggtgaccacgactgcaccggttactggaatgttttgcgccagcgtcaattgaatgtcaccggtgcctggcggcatatcaagcaccagatagtcgagatccggccacaaggtttcctgcaacatctgcattaacgccttgctcgccatcggtccacgccacaccatcgcattgtcgtcagtgaccagataaccaatactattggttgccaggccatgagacataatcggtgccatatgggtaccgtccgggctagttggacgctgattttctgcgcccaacattgttgggatacttgggccgtagatatcggcgtccagaatgccgactttcgccccttctgccgccagcgccagtgccaggtttaccgccgtggagcttttacccacgccgcctttaccggaactcaccgcgataatgttcttcacaccgttaattcccggctgattcttcacgcgtttcagagtggctatgttatggctcagtttccagtcgatagctttcgccccggtgatgcgcagcagttcggcgctacattgctcttttaactcttcgaacgcgctatgccagacaaacggcataaccagttccacatgcaacgtgtcgtccatccaggcgacatggtgcaacgctttcagcgtggtgaggttatgcttcagggttgggtgctgaaaattggccagtgtcccggcgaccattgcgcgcaaggcttctggacttttggcctgggattgttcgttcatcccgactccttttttgtatagataaaccatcagctgatagtttacctgaagaatatagagaagtacttacttaacattttcccatttggtactatctaaccccttttcactattaagaagtaatgcctactatgactcaagtcgcgaagaaaattctggtgacgtgcgcactgccgtacgctaacggcagtatccacctcggccatatgctggagcacatccaggctgatgtctgggtccgttaccagcgaatgcgcggccacgaggtcaacttcatctgcgccgacgatgcccacggtacaccgatcatgctgaaagctcagcagcttggtatcaccccggagcagatgattggcgaaatgagtcaggagcatcagactgatttcgcaggctttaacatcagctatgacaactatcacagcacgcacagcgaagagaaccgccagttgagtgaacttatctactctcgcctgaaagaaaacggttttattaaaaaccgcaccatctctcagctgtacgatccggaaaaaggcatgttcctgccggaccgttttgtgaaaggcacctgcccgaaatgtaaatccccggatcaatacggcgataactgcgaagtctgcggcgcgacctacagcccgactgaactgatcgagccgaaaagcgtggtttctggcgctacgccggtaatgcgtgattctgaacacttcttctttgatctgccctctttcagcgaaatgttgcaggcatggacccgcagcggtgcgttgcaggagcaggtggcaaataaaatgcaggagtggtttgaatctggcctgcaacagtgggatatctcccgcgacgccccttacttcggttttgaaattccgaacgcgccgggcaaatatttctacgtctggctggacgcaccgattggctacatgggttctttcaagaatctgtgcgacaagcgcggcgacagcgtaagcttcgatgaatactggaagaaagactccaccgccgagctgtaccacttcatcggtaaagatattgtttacttccacagcctgttctggcctgccatgctggaaggcagcaacttccgcaagccgtccaacctgtttgttcatggctatgtgacggtgaacggcgcaaagatgtccaagtctcgcggcacctttattaaagccagcacctggctgaatcattttgacgcagacagcctgcgttactactacactgcgaaactctctagccgcattgatgatatcgatctcaacctggaagatttcgttcagcgtgtgaatgccgatatcgttaacaaagtggttaacctggcctcccgtaatgcgggctttatcaacaagcgttttgacggcgtgctggcaagcgaactggctgacccgcagttgtacaaaaccttcactgatgccgctgaagtgattggtgaagcgtgggaaagccgtgaatttggtaaagccgtgcgcgaaatcatggcgctggctgatctggctaaccgctatgtcgatgaacaggctccgtgggtggtggcgaaacaggaaggccgcgatgccgacctgcaggcaatttgcagtatgggcatcaacctgttccgcgtgctgatgacttacctgaagccggtactgccgaaactgaccgagcgtgcagaagcattcctcaatacggaactgacctgggatggtatccagcaaccgctgctgggccacaaagtgaatccgttcaaggcgctgtataaccgcatcgatatgaggcaggttgaagcactggtggaagcctctaaagaagaagtaaaagccgctgccgcgccggtaactggcccgctggcagatgatccgattcaggaaaccatcacctttgacgacttcgctaaagttgacctgcgcgtggcgctgattgaaaacgcagagtttgttgaaggttctgacaaactgctgcgcctgacgctggatctcggcggtgaaaaacgcaatgtcttctccggtattcgttctgcttacccggatccgcaggcactgattggtcgtcacaccattatggtggctaacctggcaccacgtaaaatgcgcttcggtatctctgaaggcatggtgatggctgccggtcctggcgggaaagatattttcctgctaagcccggatgccggtgctaaaccgggtcatcaggtgaaataatcccccttcaaggcgctgcatcgacagcgccttttctttataaattcctaaagttgttttcttgcgattttgtctctctctaacccgcataaatactggtagcatctgcattcaactggataaaattacagggatgcagaatgagacactttatctatcaggacgaaaaatcacataaattcagggcagttgagcaacagggaaacgagttgcatatcagttggggaaaagttggcaccaaagggcaaagccagataaaaagtttttcagatgctgcggcagcggcaaaagcggagcttaagctgattgcggagaaggtgaagaaggggtatgtggagcaagcgaaggataattctttgcaaccttcccaaacggtaacgggctctctcaaggtagcggacttatccaccattattcaggaacaaccctctttcgtagcagaaacccgtgcgcctgacaaaaatacagatgctgttttaccgtggctggcgaaagatattgctgtcgtttttccgcccgaagttgtacacaccacgttaagtcatcgccgctttcccggagttcctgttcagcaagcagacaaattgccccaattacgtcgcttagcctgtagtgtgtcgcaacgggataataaaacagccacatttgacttcagcgcctgttctttagaatggcaaaacaccgtcgcccaggcgatcagtcagatcgacggcctgaaaacaacacagttaccatcaccagtaatggctgtactcacggcacttgaaatgaaatgcacaagatataaagtgcgtgaggatgttatggatcagatcgtccaggaaggcggtctggaatatgctactgatgtaataatacaccttcaacagattgatattgaatgggattatgcgaataatgtcattattattctgccgtctggcattgcacctagctacttggagcaatattccagatttgaatgacgcctacgtaaacatttatcactgacggaagagtctctctggcaaaaatgtgcacaaaaacttattgccgcaattccacatattccagaatggcggcaaccattaattgctttgttattacccgaaaaaccagaaattgcacatgaaattgcccagcgtctactggggcaaaaaaaattaccctcgcttgagtggttaaaaatagtggcgactgatgagcacattcttgcctcattagaaaaatatcacgaaccatatgccatttttgatgattactattgtggtgcgatatggtcagccaccgtattacaggagcaaggtgttgcagccctgccccgatttgctccctatgccgcaagtgactactgcgccgatgtgttgcgtcatatcaatcatccgttcgcattgacactgcttatacgtgtagccgggcaaactaaacgctgtcacgatcggatgacgaaagccattgctgcgttcccacatgcagcaatggcggcactgacggaacttcttgggcaaaaagaagagaacagttggcgcattatgctaatgacaatgcttatctcacaaccagcactggcagaacaggtcattccctggctctcgacacccgcagttgccgtactgaaatcatgccagcaacaactgacacagccctcaaaccatgccagcgccgatctactgccagccgtagtagtctcccctccctggctttcgaaaaagaaaaaatcgccgattccggtgctggatttagcgccattaggcattgagccaatctgttatctgacagaagaaatcagtaatcaacttttggcgaaatatatctggtattcaaaacacatcacggttagccatgaagaaagtactaccaacctgttggcaaggatgggttttcaacgacggatcgctggtacatatattaaagctcccgaagcggtagttgaggcatggctaaatgaagattattcaaccttactaagtgaatttaaggtgtttcattcacctaccgggcattattggcagttggggattttgacaacattgccgctggagaaagcagtaaaagcatggaatgcccttaccctatctccacataccgataccgaatactccatgttacattttggactcaaagggttacctgggttagtaaactcacttgcacgctatccacaagaagccttgcccatcacgaattacttcgcagcgagtgagctggctcctgccgtcgcccgtgccttcaacaaactgaaaacgctacgcgaaaacgcccgtagctggctgttgaaatacccggaacatgcccttaccggcctgctgcctgcggcgctcggcaaagccggtgaagcacaggataacgcccgcgctgccttgcgtatgcttaccgaaaacggtcatcagccattactgcaagaaatcgcccgacgttataaccagccggaagtaaccgatgcggtgaacgctctgcttgcgctcgatcccttagataatcacccgacaaaaatccccactcttccggccttttatcagccatcgctctggacgcgcccggtattaaaagcaaatgcccaatcactgccagatagcgccctcctccaccttcggtgaaatgctccgcttccctcaggaagaggctctgtatccgggattattgcaggtgaaagacgtctgttccgccgactcactggcgggatttgcctgggatctgtttaccgcctggcagaccgctggcgcgccgtcgaaagagagttgggcgttcactgcgttaggcgttctcggtaacgatgacaccgcccgcaaactgacgccattaatacgcgcctggcctggtgaatcccagcataaacgcgccaccgttgggttggatattctcgctgctatcggtagtgatatcgcccttatgcagcttaacggcatcgcccagaaactgaaattcaaagcattacaggagcgggcaaaagaaaaaattgccgacattgccgagagccgcgaactcacggtggcggagcttgaagatcgggttagcaccggatctcggtctggatgataacggttcgctgctgctggattttggcccacggcagttcaccgtcagctttgatgaaaccttaaaaccgtttgtgcgtgatgtttccggcagccgcctgaaagacctgcccaaaccgaacaaaagcgatgatgaaacgcgggcgaacgatgcggttaaccgctacaaattgctgaaaaaagatgcgcgtaccatcgccgcccagcaggtagcaaggctggaatccgccatgtgcctgcgccgccgctggtcgctggaaaacttccagctcttcctggttgagcatccgctggttcgtcacttaacccgccgtctgatttggggcgtttatagcgccgaaaaccagctactggcttgctttcgcgtagcagaagataacagctccagcaccgctgacgatgatcttttcaccctgccggaaggcgatatctctatcggcactcctcacgttctggaaatatcaccaacggatgctgccgcctttggtcagctttttgccgactacgaactgctaccaccgttccgccagctcgaccgtaacagctacgccctgacagaagccgagcgcaatgccagtgaactgacccgctgggcaggcagaaaatgcccgagtggtcgggtcatggggctggcgaataaaggctggataaagggcgaaccacaggatggaggctggatcggatggatgatcaaacctttgggtcgctggtcgttaatcatggaaatcgatgaaggctttgcggtaggcatgtcgccagccgaactcagcgctgagcagctcttaagcaagctgtggctatgggaaggcaaagcagaaagatatggctgggggagtaattcaacacaggaagcgcagttctccgtaatcgatgccatcaccgccagcgagctaattaacgatattgaagccctgtttgaataaggaaagagcatggacaaggaattaccgtggctggcggataacgcccaactggaactgaaatataaaaaaggcaaaacgccgctcagtcatcgtcgctggccgggcgaaccagtgtccgttatcactggaagtctcatccagacattgggtgatgaattgctacaaaaagctgagaagaaaaaaaacattgtctggcgttatgagaattttagtctggagtggcagtccgccatcacgcaggccatcaacttgatcggcgaacacaaacccagtatcccggcccggacaatggcggcgctagcctgtatcgcgcaaaatgacagccaacagttgctcgacgaaatcgtccaacaagaggggctggaatatgcgactgaggtggtgattgcacgccagtttattgcgcggtgttatgagagtgatcctctggtagtgacattgcagtatcaggacgaggattatggctatggttatcgcagtgaaacctataacgaattcgatctccgactgcgtaagcatctctctctggcagaggaaagctgctggcagcgttgcgccgacaaactcattgccgcactaccaggaataaacaaagttcgccgcccttttattgcgctgatcctcccggaaaaaccagaaatagccaatgagttggtaggccttgaatgcccgcgaactcattttcattctaaggagtggttaaaagttgttgctaatgaccccacagcggtgagaaaactcgaacactactggagccaggatatatttagcgatcgagaagccagctacatgagccatgaaaaccacttcggctacgcggcctgcgccgcccttttgcgcgaacaaggactggcagccattccgcgcctcgcgatgtatgcccataaagaagattgcggcagtctgctggtacaaattaaccatccgcaagtcatccgcaccttgctactggtggctgataaaaacaaacccagcctgcaacgtgtagctaaataccataaaaacttcccccatgcgacgctcgccgcactggcagaactgctggcgttaacagaaccaccagcccgccctggttatccaatcatcgaagacaaaaagctgcctgcacagcaaaaagcacgcgatgaatactggcgtacgctgttacaaacgctgatggcaagccagccacaactggcagcagaagtgatgccgtggttaagtactcaaccccagagtgtgctgaagagttatttaagcgcaccgcccaaaccggttattgatggcaccgataacagcaatctgccagaaatcctcgttagtccaccgtggcgtagtaagaaaaaaatgacagctccacgtcttgatttggcaccgctcgaattaactccgcaagtttactggcaaccaggcgaacaagagaggcttgccgccactgagcctgcccgttatttcagcacggaatctcttgcgcaacgcatggaacaaaaaagtggacgagttgtattacaggaactgggttttggggatgatgtatggctgtttctgaattatatactccccggaaaactggatgctgcacgcaatagtctctttgttcagtggcattactaccaggggcgggttgaagagatcctgaatggctggaactccccggaagcacaattagcagaacaggcgctccgcagcggtcacatagaagcgttaattaacatatgggaaaatgacaactacagtcattatcgtccggaaaagagtgtctggaacctgtatttattggcacagttgccgcgtgagatggctttgaccttctggctgcgtatcaatgagaaaaagcatctgttcgcgggtgaggactattttctcagtatcctcggattggatgcgctaccaggtctgctgttggcttttagtcatcgtccaaaagaaacatttccgttaattttaaattttggcgcaacagaactggcgctgcctgttgcccacgtctggcgacgtttcgcggcgcagcgtgatctggctcgccagtggattttacaatggccggaacatacggctagtgcacttatccctcttgtctttaccaaacccagcgataatagcgaagccgcattacttgccctgcgtttactgtacgaacagggacatggcgaattgctacaaaccgtggcaaaccgctggcagcgtacagatgtatggtctgccctggagcagttgcttaaacagggtccaatggacatttacccggcacgcattccaaaagcccctgatttctggcatccgcaaatgtggtccaggccgcgccttatcactaataatcaaactgttaccaatgacgctctggaaattatcggcgaaatgctgcgctttacccaggggggacgtttttatagcgggctggaacaactgaaaacgttctgccagccacaaacgctggcagcttttgcctgggatctcttcactgcgtggcaacaagctggtgcccccgcaaaagacaactgggcatttctggcgttaagtctctttggtgacgaaagcacggcacgggatctgacgacacagatcctcgcctggccacaagaaggcaaatctgcccgtgctgtcagcggcctgaacatccttaccctgatgaataatgatatggcgctgatacagctgcatcatataagccaacgggctaaatcccgccccttacgtgataacgcggcggaatttcttcaggtggtcgcagaaaatcgcgggctaagccaggaagagctagcggacagattagtcccaaccctgggccttgatgatccgcaggcgttgagttttgattttggtccccggcagtttaccgttcgcttcgatgaaaatctcaacccggttatctttgatcagcaaaacgttcgccagaaaagcgttccccgtttgcgcgccgatgacgatcaactgaaagcgcccgaggcactggcccgactaaaagggctaaaaaaagatgctactcaggtgagcaaaaacctgctcccgcgtcttgaaacggccctacgtaccacccgacgctggagcctggcagattttcattctctgtttgttaatcatccctttacccgtctggttacccagcgattaatatggggggtttatccggcaaatgaaccgcgttgtttactcaaagcctttcgtgtggccgcagagggggagttctgcaatgcgcaagatgagccaattgacctgcctgcggacgctctgattggcattgcccacccgttagaaatgacagcagaaatgcgcagtgaatttgcacagctttttgccgattacgaaattatgccgccttttcgccagttgagccgccgcacggtgctgctcacacctgacgagagtaccagtaacagcctgactcgctgggaaggtaaatccgctaccgttgggcaacttatgggaatgcgatacaaaggctgggagagtggctatgaggacgcatttgtctataacctgggtgagtaccggctggtccttaagtttagtcccggttttaaccactacaatgttgatagcaaagcgctaatgagcttccgttctcttcgagtgtaccgtgacaataaatccgtcacttttgccgaacttgatgtgtttgatttgagtgaggcgttaagcgcacctgacgtcattttccattaaaacacagcgggcagtgatgcaactgcccgttatcaacacgacttaccagcggggaaagcgatgatcgtgcaaaaagagctggttgctatttacgattatgaggtccctgtacctgaagatccgttttccttcagacttgagatccataaatgctctgaattatttacaggttccgtctatcgactggagcgattccggctacgtccaacatttcatcaacgtgatcgagaagatgctgacccgctaataaatgatgcgttgatttatataagagatgagtgtattgatgagcggaaattacgaggtgaaagtcctgaaactgtaatagcaatttttaatcgtgaactacagaatatattcaaccaagaaatagaataatatactctaaataattcaaattggtccgatccggcgcaacgtcccaatggcctggattataaatctcattatcttaattgcaacggggtccagccgtggttataattcgttcgttggaacacgatgttgcacaggctgtggtgttaggcctgaaaatagtaaataaaagaacctgcctcaccagcaggtttttttatttactgtgatctgctttccagatatttttcgctcaaacaactaatgcgccaaacatttattgcgcgtaaaatatcgtttatttcattaatacatttcagggatgaatatatgagtccgcagaataatcatctgcagcgtccgcctgctgctgtgttatacgccgatgaactggcaaaattaaaacaaaatgataacgcaccttgcccgcccggttggcagttaagtttgcctgcggcccgtgcttttatccttggcgacgaagcgcaaaatatcagccgtaaagtggtgattagcccctccgctgtcgaacgtatgttagtcactcttgctaccggccgcggtttgatgttggtgggggaaccgggtaccgcaaaatctcttctttctgaattactggcaaccgctattagcggcgatgccgggttaaccatccagggcggggcatctaccaccgaagatcaaatcaagtatggctggaactacgccctgcttatcaatcatggtccgagtacggaagcgctggtccctgccccgctttatcagggaatgcgcgacggcaaaatcgtccgtttcgaagagataacgcgtacaccgctggaagtgcaggactgtctgttaggtatgctttctgacagggtgatgacggggccggaactcactggtgaagccagtcagctctatgcgcgagaaggctttaatattattgccactgccaatacccgcgatcgcggcgtcaatgaaatgagtgctgcgctaaagcgtcgcttcgattttgaaacggtttttccgattatggatttcgcccaggagttggaactggtcgccagtgctagcgcgcgtttgctggcccatagcggtattccgcataaagtgcctgacgcggtactggaattactggtccgcaccttccgcgatctgcgtgccaacggcgaaaagaaaacgagtatggatacactgacagcgattatgtccaccgctgaagccgtgaacgtggcccatgctgtgggcgtccgcgcctggtttttagcgaatcgcgcgggggagcctgccgacctggtggaatgtattgccggaaccatcgtcaaagataacgaagaagatcgcgcgcgtctgcgccgttacttcgaacagcgtgtcgccacacataaagaagctcactggcaggcttattatcaagcccgccaccgcctgccgtgaggaaagatgcatgagcgagccgttaattgtcggcatccggcatcatagtccggcctgcgcccggctggtgaaaagcttaatcgaaagccagcggccacgatacgtgttgattgaaggcccggctgattttaatgaccgggtagacgaactgtttttagcccaccagcttccggtagctatttacagttattgccagtatcaggacggtgcagcccccgggcgtggtgcctggacgccatttgctgaatttagcccggagtggcaggcgctacaagccgcacgtcgcattcaggcacaaacttacttcatcgatttgccttgctgggcgcagagtgaagaagaggacgatagccctgatacgcaagatgaaagccaggccttactgctgcgtgccacccgcatggataacagcgataccctgtgggatcacttgttcgaagatgaaagccagcaaactgcattaccctctgcgctggcgcactattttgcccaactgcggggcgacgcctccggcgatgcgctcaatcgtcagcgcgaagcctttatggcccgctggattggatgggcgatgcagcaaaataatggcgacgtgttagttgtctgcggtggctggcacgctccggcactggcaaagatgtggcgcgaatgccctcagaaaattaacaagccagaattgcccagcctggcagatgccgttacaggttgttatctcacaccctacagtgaaaagcgccttgatgtgctggcaggataccttagtggaatgcctgccccggtatggcaaaactggtgctggcagtggggcttgcagaaggccggtgaacaactgctaaaaactatccttacccgtttgcgccagcacaaattgcccgcttctaccgcggatatggctgccgctcatctgcatgcgatggcgctggcacagttgcgcggtcatacactaccgttacgcactgactggctggatgccatagcaggcagcctgattaaagaagccctgaacgcgccgttgccgtggagctatcgcggcgttattcatcccgataccgatccgattctgctaacgttgatagacacattagcgggtgacggattcggtaaacttgccccttctacgccacaaccgcctctgccaaaagatgtcacctgcgaactggaacgtaccgcaatctcccttccggcggagcttaccttaaatcgctttacccccgatgggctggcgcaaagtcaggtgttacatcggctggcaatactggagatccctgggattgtacgccagcagggaagtacactgacacttgcaggcaacggtgaagaacgctggaaattaacccgcccgcttagccagcatgcggcattgattgaggccgcctgttttggtgccacactccaggaagccgcacgcaataaattagaagccgatatgctggacgcgggcggaatcggcagtatcaccacatgtcttagccaggcggcgttagcgggtctggcgtccttcagtcaacaattactggagcaactcacactattaatcgcccaggaaaatcaatttgccgaaatgggccaggcgctggaagtgctttatgccttatggcggctggatgaaattagcggtatgcaaggcgcgcagatattacaaacgacgttatgcgcgactatcgatcgcacgctgtggctgtgtgaatctaacggcagaccggatgaaaaggagtttcacgctcacctgcatagctggcaagcgctttgccatattctgcgcgatctacatagcggcgttaatttacccggcgtttctctttctgcggcggtagccttactggagcgacgcagtcaggcaattcatgccccggcgctggatcgcggcgcggctcttggcgcactaatgcgtctggaacatcccaacgccagtgccgaagcggcgctgacgatgctggcgcagttatccccggcacaatctggtgaggcgctgcacggtttgctggcgctggcccgccatcaactggcctgtcagccggcatttatcgccggtttcagcagtcatttaaatcaactgagtgaagccgattttattaacgccctgcccgatttacgcgcggcgatggcctggctaccaccacgagaacgcgggacgctggcgcatcaggtgcttgagcattatcaactggcgcaacttcccgttagcgcgctgcaaatgccgttgcattgtccaccacaggccattgcacatcatcaacaactcgaacagcaggcactggcaagcctgcaaaactggggagttttccatgtctgaactgaacgatcttctgaccacccgtgagctacaacgctggcgattaattcttggcgaagcggcagaaacgacgctttgtgggctggatgacaacgcccggcagatagaccacgcgctggagtggctgtatgggcgcgatcctgaacggctccagcgtggtgaacgttccggtggattaggtggcagtaatctcaccacccctgagtggatcaacagtattcacacgctgtttccgcagcaggtgattgagcggctggaaagcgatgccgtgctgcgctacggcattgaagatgtggtgacgaatctcgacgtgctggaacgtatgcagccttctgaaagcctgctacgcgctgttttgcacaccaaacatctgatgaaccccgaagtactggctgccgcccgccggatagtgtgccaggttgttgaagaaattatggctcgactggcaaaggaagttcgtcaggctttttctggtgtccgcgatcgccgtcgccgtagttttattccactggcgcgaaactttgatttcaaaagtactctgcgcgccaacctgcaacactggcacccgcaacacggcaagttgtatatcgaatccccccgctttaacagccgcattaaacgccaaagcgaacaatggcaactggtcttactggttgatcaaagcggaagcatggtcgatagcgtgatccactctgcggtgatggcggcctgtttgtggcagttacccggcattcgtacccatctggtggcgtttgacacaagcgtcgttgatctcacggcagacgttgccgatccggtagagttattaatgaaagtacagttgggcggcgggaccaatatcgccagtgccgtggagtatggtcggcaacttattgaacaaccagcgaaaagcgtcattatcctcgtgagcgatttttacgaagggggtagtagtagtttactgacgcatcaggtgaaaaagtgtgttcagagcggcatcaaagtgctgggactggcagcgctcgatagcaccgcaacaccttgctatgaccgcgatacggcccaggcgctggttaatgtcggcgcacaaatagccgccatgacgccgggcgagctggcaagttggcttgcggagaatcttcagagttgacataacttgcggagaatcttcagtcatgaatagtctacgtccggaattattagaactgacaccgcaggccctgacggcgttaagcaatgccggttttgttaagcgcagtcttaaggaactggaaaatggcaacgtcccggagatcagccatgagaacgacgctttaatcgccaccttcagtgacggtgtccgtacccagctggcgaacggccaggcactgaaagaggctcagtgcagttgcggggccaacggtatgtgccgtcatcgcgtgatgctggtgttaagttatcaacgactttgtgccaccactcagtctacggaaaaagaagaagagtgggatccggcaatctggctggaagaactggctacccttcccgatgctacccgcaaacgcgcacaggcgctggtcgctaaaggcatcaccattgagttgttctgtgcgccgggtgaaattccctctgcccgcttaccgatgagcgatgtgcgtttttattcccgcagcagtattcgtttcgcccgttgtgattgtattgaaggcacactttgcgaacatgtcgtactggcggtacaggccttcgtcgaggccaaagcgcagcaagcagaatttaaccatttaatctggcagatgcgcagcgaacacgtcacaagttctgacgatccgtttgccagcgaagaaggcaacgcgtgtcgtcaatatgttcagcaattaagccagacattatggcttggcggcatcagccagccgctcatccattacgaggcagcattcaaccgcgcattgcaggcggcagagacctgcaactggcgctgggtgagtgaaagcctacggcaactgcgcgccagcgttgatgccttccacgcccgcgccagccactataatgccggagaatgcttacatcagcttgcggcattaaacagtcgattaaattgcgcacaagagatggcccggcgcgacagtattggtgaagttcctcctgtgccgtggcgcacggtcgttggctctggcattgccggagaagcaaagcttgatcatctgcggctggtgtctttaggtatgcgttgctggcaggatattgagcattatggtttacgcatctggtttaccgatcccgacaccggcagtattttgcaccttagccgcagttggccgcgaagtgaacaggaaaacagtccggcagctacgcgtcggctgtttagttttcaggctggcgcactggcgggcgggcaaattgttagtcaagcagcaaaacgcagtgccgatggcgagctgctgttagctacccgcaaccgcttaagcagcgttgtgccgctgagccctgatgcctggcaaatgttgagcgcgccgttacgccagccgggcattgtggctttgcgggaatatttacgccagcgtccccccgcctgcatacggcctcttaatcaggtcgataacttatttattctgccggtcgctgagtgtattagcctcggttgggacagcagccgccagacgctggatgcgcaggtcattagcggcgaaggggaagataatgtgctgacgttaagtttaccagccagtgccagcgcaccttatgccgttgaacgcatggcggcgcttttgcaacaaacagacgaccccgtgtgtctggtttctggctttgtcagttttgttgaagggcaattgacactggaaccacgggtgatgatgacaaaaacccgtgcctgggcgctggacgcagaaactacgcctgtggcaccgctaccttctgccagcgttttgcctgtgccgtctactgctcatcagttgctgatacgctgccaggcgttacttattcaactgctccataacggctggcgctatcaggaacagagtgctattggtcaggcataattgctggcgaatgacctcaccgcggtgggtttttatcggctggcacatgtgttgggacaatttcgtaatacagaaagcgaggcacgggtagaagcaatgaataacggtgttttgctttgcgaacaattattccccatgcttcagcaacaaggatgaaatagtgctttttactaagagttctactccagttccggactgctcacgccacggtattaggcatatcctatatagcccctggtgagagtcaccagttccttgattaaataaaatggagttttacatgaaggctttcaataagctgttttccctcgttgttgcatctgttctggttttctctcttgctggctgcggtgacaaagaagaaagcaagaaattcagcgccaatctgaacggcactgaaattgccattacctatgtctacaaaggtgacaaggtgcttaagcaatcttctgaaaccaaaattcaatttgcctccattggtgcaaccaccaaagaagatgctgccaagacacttgagccgttaagcgccaaatacaaaaacatcgcgggtgttgaagaaaaattaacctataccgatacctacgcgcaggaaaacgtgactatcgatatggaaaaagtggattttaaagccctgcagggtattagtggaatcaacgtttctgctgaagatgccaaaaaaggtatcactatggcgcaaatggaactggtgatgaaagccgctggttttaaagaagtgaaataatcggttggcggtcatgctctaaacatgaccgccaattttttagccttttttcacatgctggcgcgctgccagtccacgcagaaaataacgtaaaaattgatcgccgcattcgcggaagtttttatgatccggtgcgcgcatcatcgctgtaatttccggcatgctaacgcggaactgctgttcggtgaggatagccagaatgtcatcggttttcaggctaaacgcgatgcgtaattttttcagcacgatgttgttattaatgcgacgttccggctccagtgccggagcagactcatccttgccgcgtttttcataaatcaggccattgaggaaactgctcaaaacaatgtccggacaacgctgaaaaccctcttcgtcttctttacgtagccagacggcgatctgttccgcggtggcttcgacattacccagcgccagaatacgcaccaggtcattattattggctttcaaaatgtagcgcacgctgcgcagaatatcgttacttagcatgaggccttcaggtgttgatgaggcaaaaagccattttagcagtcttttacaggccaatcgcctcttttaagcttttcagataacggcggctgaccggcacggttaagccattacgcaaaatcaactcggcctggccgttatcttccagacgaatctcctgtaaatgcgcgaggttaaccagatactgacgatggcagcgcagtagtggtgtacgactttccagggtacgtaatgtcaattcggtaaagccctctttcccttcgtggctggtaacgtagacaccgctcatccgactgctgacaaatgccacatctttcatttgcagcaaataaatccgactatgccccgtacaagggataaatttcagcgcctgttgattttccggtaacaggctaacatcctgcttgctgcgctcctgacgcaatcgcgccagcgttttctccagtcgcgcttcatcaattggcttcagcagataatcaaaggcatgttcttcaaaggctttaattgcgtattcgtcaaacgcagtgagaaaaacaatatacgggcgatgttccgggtcaagcatccccaccatttccagaccactgatgcgcggcatctggatatcgagaaacagcacatccgggcgcagtttatgcaccgcgccgatcccttccacggcgttactacactctccaacgatttcaatatcgctctgctcctgcaaaaatacacgcaggttctcccgtgctaacggttcatcatcgacaattaagactttaatcatgcctcgtccctccatggtagtcgtaacgttattcgggtgtaactatcaggctcacaggcgacgcttattccatagtcatcgccaaaccgttcacgtaaacgcttatccaccagattcatccccagcccactggcattggttaccggttgatacaaaccggcattgtcttcgatctccagcatcaaatgttgcccctcacgtcgggcgctgattgccactcgccctgtatccagcagttgacttgtcccatgtttaatggcgttttccactatcggttgcagggtaaacgcgggcaattgctgctgggataattcttgcggaatagcaatgttgacctgcaaccggctctggaagcgcgccttttcaatttgcagataagcattcacatgttcaatttcgtcggcgagagtaacaaactcgctaggccgctttaagtttttgcggaaaaaagtggaaagatactgcaccagctggctggcctgttcgctgtcgcggcggatcaccgctttaatggtgttaagcgcattaaacaaaaaatggggattcacctgggcgtgaagcagtttgatctcactctgggtgagcatcgctttttgccgctcatattgcccggcaaggatctgcgcgctaagcaattgcgcaatcccctcacccaacgtgcggttgatgctactgaataaacggtttttggcttcatacaatttgatggtgcccatcacccgctgattttcaccacgcaacggaattaccagcgtgctccccagtttgcattgcggatgcaaagagcaacggtaaggtacttcgttgccatcagcgtagaccacttcaccggtttcaatcgcttttaaagtataagtactagaaatcggtttgccgggtaaatggtggtcgtcaccaattccggtaaaggccagcaatttctctcgatcggtaatcgcgactgcaccaatatccagttcctgatacagcacctgagccactttcatgctgttcacttcgttaaacccctggcgcaaaatgccttccgtgctggctgccactttcagcgcagtggcagaaaaagcgctagtgtatttttcaaacatcgcgcgtttatcgagcaatatacgcataaacagcgccgcgccgacggtattggtgaccatcattggcgcagcaatattactcaccagacgcaccgcatcttcataaggtcgggcgatcgcaaggatgatcagcatttgcaccatttcagcgacgaacgtgacggcaccggcggtaatggggttaaagactttatcagtgcgcccgcggcggatcaggatgctgtgtaccaggccaccgagtaatccttcaacgatggtgctgatcatgcaacttaacgcggtcatgccccccatgctatatcgatgtaagccgccggtcagcccaaccagcccaccgacgaccggaccgccgagtaagccgcccattaccgcgcctatcgcacgggtattggcaatagaatcgtcaatgtgcaacccaaaccaggtgcccatgatgcagaagatggaaaagacgatgtagcagagaaatttatgcggcagacgaaccgtgacctgcattaacggtatgaataatggcgttttactcattaaccatgcaatgactaaaaaaacgcacatctgctgaagcagcagcaacaccagattaaaatcgtacatacccgcaaaccacacttccctttaaaacgcgtaacatacattgcctgcgtttaactttctttgaactcttgcagaaaaatgagaattcgtgagtacgatcactcaaaatcgcctggcaaaaataaaatcaccctatagatgcacaaaaaacgggcaaaactacctggttcgcaaaactgcgtctaaagttaaaccgggacctcgcgagcaagggtgagacgatggcgctttacacaattggtgaagtggcgttgctttgtgatattaatcctgtcacgttacgcgcgtggcagaggcgttacggattgctgaaaccgcaacggacagacggcggtcatcggctgttcaacgatgccgatattgaccggatccgcgagatcaaacgctggatcgacaacggcgtgcaggtcagcaaagttaaaatgctgctcagtaatgaaaatgttgatgtgcagaacggctggcgcgatcagcaagaaacattactgacttacctgcaaagcggcaatctacatagcctgcgaacgtggatcaaagagcgcggtcaggattaccccgcccagacactcaccacacatctgtttattcctctgcgccgacggcttcagtgccaacaaccgactctccaggcgctgctggcgatcctcgacggcgtactgatcaactacatcgccatttgtctggctagcgcacgtaaaaaacagggtaaagatgcgctggtggttggctggaatattcaggataccacccgtctgtggctggagggctggattgccagtcaacaaggatggcgcattgatgtcctcgcccacagcctcaatcaactacgccctgaactattcgaaggccgtacattgctggtgtggtgcggtgaaaatcgaacctccgcccaacagcagcaactcaccagttggcaagaacaaggccatgatattttcccactcggcatttaatgattcgttaacaaatgcgctttactgtacaatcctttcgttaacataaggagtgcattatgcgcatagctaaaattggggtcatcgccctgttcctgtttatggcgttaggcggaattggtggcgtcatgctcgcaggttatacctttattttgcgtgctggctaagcgcctgcaccagcctttcaaacaggcggtctgcgatgatcgccgccagtgccaccagtaacgccccctggatcacatacgcggtattaaatccgctaagcccgatgatgatgggcgtacccagcgtgctggcccctaccgtactggcgatcgtcgccgtaccaatgttgataatcacgctagttcgcacgcccgccagaatcaccggagccgccagcggtagctcgaccttacgcactcgctgaccacgactcattcccatacctttcgcaacttctgtcacgctggcatcaatcgctcccagcccggcaagtgtcgcctgcaggacgggcagcacaccgtaaaggatcaaggcgataatcgctggttgcagaccaaagccgatcaccggaacggcgatcgccagcactgcgacgggcggaaaagtctgtccaacggcggcaatagtttccaccagtgggcgaaattccgcgccccacgggcgagtgacagcaattccggcaccagtgccaatgatcaccgcaaacaaactgctaattcccaccagccagaaatgagccagtgccagagctgcaaaactttcttgctgataaacgggtcgtggcagttgtgggaacaaggcagcaaacagcggctggctgtaaggcagccagaaaatcagcgccacaaacagagcaatgagccagaacagcggatcgcgcaacatcttcatacgcttacgcctccaccagcagatcctgaaaatgcagcgtgccgcaaggctggccctgcatgttcaccaccggcagcacctcgcatccccgcgcaacaaacagagagagcgcatcgcgtagcgtcatctcttctgccagtgcctcaccatctgctcgttcttcgcgacgcacgtaatccgccacactacgtaagctaagcaggcgcacacccagttcactacgtccaaaaaactggcggacaaaatcattcgccggacgagtcagcatcgtcagcggattgccctgctgcactacttcaccgtgatccatcaataccagatgttctgccagccgtagcgcctcatcaatatcatgagtgaccagcacaatggtacgccccagcaaacggtgaatgcgcgtcatctcttgttgcaacgcgccgcgcgttaccgggtccagtgcgccaaaaggttcatccattagtaagacttgcggatcggcagccagtgcacgcgccactcccacacgttgctgctgaccaccggaaagctgatgcggataacgctcacgcaaattactctccagccccagtagcgccattaattcgtcgatacgatcgtcaatccgcgcccggctccatttttgtaattgcggcacggtagcgatgttttgcgccacgctccagtgggggaacaggccaatagattgaatggcatagcccatccggcggcgcaactccagtactggcaggctgcgaatttcttctccggcaaagcggatctctccgctgtcatgctccaccaggcggttaatcattttcagggtggtggatttgccggagccagatgtgccaatcagcacgctaaaactcccttcctgaaaattgagattgagatcgttaacggctttttgtgcgccgaacagtttgctgacatggctaaattcaatcattacgtttcaccttcagcagtgcgataagcaaatcgaacagcgcgtcggtaagcaccgccagaacaattaccgggatcacccccagcaacactaaatcaatggcgctgcttagcagcccctggaaaaccagcgcaccaaaaccgcctgcgccgattaacgccgcaatcaccgccatacctacagtttgcaccatcaccacccgcaggctgcgcagaaataccggtaacgccagcggtaactgaacatgcaggaaacgctgcgccccgctcatccccatcgctctggcgctttccagcacatcgcgcgggatctggttcaaaccgactaccacgccgcgcaccagcggcagcaaggcatagagcaccagcgcaatcagtgcgggtgtcattccggttcctgctatgccgagcgtccccagccacggaaaggccgtaaccagcgcggcaagcggcgcaatcaacaggccaaagagcgccacgctaggcacggtctgaatcacattgagcagagaaaaaattgccccctgccgagcagtggaaaagtagcaccagatgcccaacggcacaccaatcactaacgcaggcagcaccgcaccaaacagcaacgtcagatgttgtgccagcgcgtcgtcaaacacatcctgacggttggcgtattctttcattagactgagatcgttaagcgtgccggagtacagcaaccacagcggaataatggcaatctgcatatgcaacaaccagcgccacagcggatgcgtggagattcggcggatggcatcgctacaggccagcaatgccagcgccgcagccagccagaaaccactgccgaggctggtacgcgccagcgcactgccattttgcgccagttgggtcgccgcctttccagctccccacaccagcaatacgaagacgaattgcgccagaatgagtgcacaaatgctgccttttttaccgggaataaaacaggccgtcagccaggcgcaaccaacgcccaccagcatccagatcgtttgcggccacagctgccagagatgacgcccctcaccgctaactaaacgattaggcgcgtaactgataaacggcagcgccgctgcgattgccgtcagcaacagcagcagcgccagaacaggattaatacggaaataagtcacgggaaattacttcgtccaccctttttgtttcaggtagtcggcagccacttttttggcatccagtccttccacagcaatgctggcattcagttgctgcaatgtttttgcatcgaggctggcgaagactggctgtagccactgtgccatttgcggatactccctcaacacgctctcacgcaccactggtgcaggcgcgtagataggttgcacaccttgcggatcgcttaaggtttgcagccccagcgccgctaccgggccgtcagtgccgtaagccattgcagcattaacgccagaggtttgctgggcagcggctttgatcgtcaccgccgtgtcgccaccagccagactcagcaactgatcctgaccgagcttaaagccataggctttttcaaacgcgggtaacgcatcggcgcgttcgataaactctgcgctggctgccagtttgaaggtgccgccctcttgcagataacgactcaggtcggcaaggctagtgagtttatttttctctgccacatcctgacgcacggcgatagtccaggtgttatttgcaggcgcgggcgtcagccagattaacttgttgtgctcgctatcgagctttttgactttctcgtaaccttgctgcgcgtttttccacgctgcatcgttttcatctttaaagaagaaagcgccattgccggtatattccggatagatatccagttcaccggaagtaatcgccccgcgcaccacaggagtcgttccgagttgcactttattcaccgtcggtacgccgtggctttccagcacctgcaaaatgatattgccgagtagcgcaccttcggtatcgattttactaccgactttaacgggggaagccgcctgtagcggcaggctcacggctgccaacataaccagactacctgcccagagctttaagagtggcatgatgctttcctcattcttttactgttgttttcagcgaattaagagaaaagcatagttgataatggcggggttagcttgagcggaaggattcagttgcagaatcagataaatacttaagaggcatattcggtccggcgtttcctgccggatgcggcgcgagcgccttatccggcctacaaagggcgcaaacgtcgcgcccttactaaagcattacagcaactcaaactcgcctttcttaacgcgtgcggaatcagtgccgataaagacattgaacttgccaggctcggcgtcatatttcatctgttgattccagaacttcagcgcctcaatatcgatcgggaagctgacagtctgagtttcgcccggtttcagggtgattttctcaaagcctttcagctgtttcacagggcgactcatggaagccgtcacatcctgcaagtacatctgcactaccgtggcaccctcgcgcttaccggtgttcgtcacctgcacgctggcagtcactttgccgtcacgcttcatggtcggcgcagaaagtttcacatcagagacggtgaaagtggtgtagctcagcccatagccgaacggatacaacgccccgttagcttcatcaaaataacggctagtgtatttgttcggcttgtcggcattatacgggcgaccggtattcagatggctgtagtacaccgggatctgcccgacagaacgcgggaaggacattggcagcttgccggacgggttgtaatcgccaaacaatacatcggcaattgcattaccgccttcagtccccgcaaaccaggtttccagaatcgcatcagcctgctgatcttctttcaccagcgccagcggacgcccgttcatcagcaccagcaccagcggtttaccggtggctttcagcgccgcaatcaagtcacgttggctttgcggaatagtgatatcggtccggctggaggcttcgtgcgccatcccctgtgcttcaccgactacagccaccaccacatcagattgtttcgccgtctgcaccgcttcatcaatcatctcttgcgggctacgcggatcgactttgaccgcttcttcatactgattcaggaaatcgataatgcctttgtcactggtaacgttcgcccctttggcatacagcactttaccgttttcaccgacggcatttttaatcccggtcagtacggtcacggattgatcggcaacaccggctgcggaccagctgcccatcacgtcacgtttactgtccgccagtggcccaaccaccgcaatggtggcgctttttttcagcggtaacgtttcgagacggtttttcagcaacaccaagctttcgcgcgccacttcacgcgcttctttacggtgcaggcggctttcgtcattggtatccaccgggtcagactctttcggccccaaatggctgtatgggtcgttaaacaaccccatatcatatttaacgttcagtacatggcgggcagcatcgtccagctctgccatcgtcactttgccggatttaatcaacccaggcagatacttgctgtagtactcgtcgctcatgctcatgttgattccggatttcagcgccacgcgcaccgcatcttccgggtctgccgccgtgccatgtttaatcagctctttgattgcaccgtgatcggaaacggtgatgcctttaaagccccactggtcgcgcagaacatctttcagcagccaggaatcggaggtggctggcgtgccgttcaggctgttcagcgccaccatcaccgcgccgctgcctgcgtccagccccgctttgtacggcggcatataatcattaaacaggcgctgcggactcatatcgacggtgttgtactctttaccgccttctaccgcgccgtatgcggcaaagtgtttgacgctggtcatcacgctgtagcgatctgccgggcttttaccctgcatcgcttccaccatggttttacccattgtactggtgagatacgtatcttcgccaaaaccttcggaagcacgtccccagcgcggatcgcggctgacatcgaccatcggtgcccaggtcatattcaggccatcatctgccgcttcataagcagagacacgtccgaccgttttcactgcatcgaggttaaaagagctggccagaccgaggctaatcgggaacaccgtgcgctgaccgtgcagcacgtcgtaagcaaagaaaagaggaattttcaggcggcttaattccatcacctgatcctgcatggcgcggatatcctgacgggttacggtgttgaaaatcgccccaacctgaccgtctttgatcatctcgcggatcgcctctttcgggttatccgggccgacgctgattaagcgcagctgaccaattttctcatcaactgtcattttcttaagcagttcggtgacgaacgcatcccgcgcttcgggcgttaatggatggttgccgaataaatcatccgccagtgctggctgcagggccagactcaccgcgattcctacactacatagccatttcatatggatttttcttcctttgttgcccgacgtggcagcgaaaatggtgcaaaaaccgtagtttgccataagcatgatggagagagaaaaagaatgctcagtttattgtctgaattttcaaaatattcactcgctgaattgttatacaaggcgctattctagtttgtgatattttttcgccaccacaaggagtggaaaatgtcttccatgacaacaactgataataaagcctttttgaatgaacttgctcgtctggtgggttctagtcacctgctcaccgatcccgcaaaaacggcccgctatcgcaagggcttccgttctggtcagggcgacgcgctggctgtcgttttccctggcagtctactagaattgtggcgggtgctgaaagcctgcgtcaccgccgacaaaattattctgatgcaggccgccaatacaggcctgaccgaaggaagcacgccaaacggtaacgattatgatcgcgatgtcgttatcatcagcaccctgcgtctcgacaagctgcacgttcttggcaagggcgaacaggtgctggcctatccgggcaccacgctctatagcctggaaaaagccctcaaaccgctgggacgcgaaccgcacagtgtgattggaagtagctgtataggcgcaagcgtcatcggcggtatttgtaacaactccggcggcagcctggtgcaacgtggcccggcgtataccgaaatgagcttattcgcgcgtataaatgaagacggcaaactgacgctggtgaaccatctggggattgatctgggcgaaacgccggagcagatccttagcaagctggatgatgatcgcatcaaagatgacgatgtgcgtcacgatggtcgtcacgcccacgattatgactatgtccaccgcgttcgtgatattgaagccgacacgcccgcacgttataacgccgatcctgatcggttatttgaatcttctggttgcgccgggaagctggcggtctttgcagtacgtcttgataccttcgaagcggaaaaaaatcagcaggtgttttatatcggcaccaaccagccggaagtgctgaccgaaatccgccgtcatattctggctaacttcgaaaatctgccggttgccggggaatatatgcaccgggatatctacgatattgcggaaaaatacggcaaagacaccttcctgatgattgataagttaggcaccgacaagatgccgttcttctttaatctcaagggacgcaccgatgcgatgctggagaaagtgaaattcttccgtccgcattttactgaccgtgcgatgcaaaaattcggtcacctgttccccagccatttaccgccgcgcatgaaaaactggcgcgataaatacgagcatcatctgctgttaaaaatggcgggcgatggcgtgggcgaagccaaaagctggctggtggattatttcaaacaggccgaaggcgatttctttgtctgtacgccggaggaaggcagcaaagcgtttttacaccgtttcgccgctgcgggcgcagcaattcgttatcaggcggtgcattccgatgaagtcgaagacattctggcgttggatatcgctctgcggcgtaacgacaccgagtggtatgagcatttaccgccggagatcgacagccagctggtgcacaagctctattacggccattttatgtgctatgtcttccatcaggattacatagtgaaaaaaggcgtggatgtgcatgcgttaaaagaacagatgctggaactgctacagcagcgcggcgcgcagtaccctgccgagcataacgtcggtcatttgtataaagcaccggagacgttgcagaagttctatcgcgagaacgatccgaccaacagcatgaatccggggatcggtaaaaccagtaaacggaaaaactggcaggaagtggagtaaaaattacggatggcagagtatcgccatccgaattcacttaatcgttctgtgccgtctgccccgccgccgccatttgggcggctttttgttttttatagctcaacgctgctgccggcacaggcatcactttaccggtttcaatccaggtacgcaggcggctggcatcggcaaaatgggtatatttgccaaacgcgtccatcactaccagcgccaccggtttattattgataaccgtacgcatcaccagacaatggcccgccgcattggtaaagccggttttggttaactgaatattccagttatcgcgatacaccagatgattagtattgcggaacggcagcgtatacgtcggattagagaaggttgccatatcttcccgggtagtacttaactgcccgatcaacggatattgtttgctggcaatgagcagtttggttaagtcacgggcagtactaacgttatgcacgctcaatccggtaggttcaacaaagcgcgtgttgttcattccgaggcttttcgctttcgcattcattgccttaataaaggctttgtaaccaccgggataatggtgcgcaaggcttgccgccgcgcggttttcactagacatcagcgccagcaacagcatatctttacggctgatttcgctattcagtcgtacgcggctatagacccctttcatctccggcgtctggctgatatccacttttagtttttcatccagcggcagtcgtgcatccagcacaaccatcgcggtcattaatttgctgatagacgcaatcggacgcaccagatccgggtggttgctatagatcactttgttggtattcagatcaacaatcatcgcgctaccggaggcaatttccggttgactagcggtggtagcggctgccgttttcgcaacggcctgcggtgcaaaaggcacagccagcatcagggccaggctaaataaagaaactcgaaatttcggcatgatgagcattcagatagtggttcacgcgcacgggttgcgcaccgccggagtaaggatttactgaggctagcgacgccatcataacgagcaaaaagtgcgatcgtcaaaggagaatcgtgaggaaatgctgcattgctgacatttacgccagcaatgcaacgtcaaagaactttttagaacaaacgataaccgtagccccatagtataacggttagggcgagcagcacttccagtaccagcacgccaatcgccagcgtgctactagagaagctaaggccttcctctttgttgatattcaggaagctcggaataccaaggtaaagcaggtagccggtgtaaaacagcgccaccgtgccgaccagcgcacacaaccagaccagtggataaagcgccaccagaccgcttaaaaacagcggagttgcaacgtagcccgcgaagaccatgcagtgcgcaagactcggacgctgcggataattacgcgccatccaccagatgacccgccccatcaccgcgaccccagccagcataacgccgtaaaacaagacagccagcgccagtccggtaaaccaggataacttcaggatagtgccatcgccaaaattccagccaatctgtgtagtgccaatgaaggcgcaaatcaccggaatcgccgccatcagcaaaacgtggtgggtgtaatggtgagaaatcgtttcgttttcgcgattaatcacctgcatttcacgatcgggatgggaaaacagtccccagacatggctcataccgcccccttgttgtgagttcatgaacctgacagttcaagtataagtcagcttgtgattattttttgttcgcccatgtaattttcactgtctgatgaacgtcctttttcagcgtgaatgattcacagggtgtatgcttactggcaaccaaagggagacagactggcctatggatctcaatacacttatcagtcaatatggttatgccgcgctggtgatcggtagcctggcggaaggtgaaaccgtgactttgctgggaggcgttgcggcgcatcaggggctattaaagttcccgctggtggtactttctgtggcgcttggcggcatgattggcgaccaggtgctctatctgtgcgggcggcggtttggcggcaagctgttacgccgtttcagcaaacatcaggataaaattgagcgggcgcagaaacttatccaacgccatccgtatctgtttgtcattggtacgcgctttatgtatggctttcgggtgattggcccgacgctgattggtgccagccagctgccgccgaaaatctttctgccgctgaatattctcggcgcatttgcctgggcgttgatttttaccactattggttacgctggtggtcaggtgattgcgccgtggttgcacaatctcgaccagcatttgaagcactgggtctggttgattctggtcgtggttctggtggtgggcgtgcgctggtggctgaaacgacgcgggaagaaaaagccggatcatcaggcgtaaaaccattgccctggataaggcgttcgcgccgcatccgacatccggagtaccatgcctgatacgacgcttgtgcgtcttttcatgccgaccaaaatattacccaatgaaatatccacgcacctcactgcgttattctgggttgaactgtggattcgccaacataaagccgccatccactatcaagctctgcccggtggtgtaatttgcgccctcgctacaaagccacaccaccaggctggcaatctcatgcgttgcgccaaaacgccgcaagggaatgctaggctccgcgtcgggcttcacgtcgctgtcatccatgccattcattggcgtggcgatcgccccaggcgcgactgcgttcaccaaaatcttatgcctgaccagctccagcgccatcgctttggttaacccaccgagcgcatgtttagcggctgtgtaggcgctggcatccggcagcggcgtatgttcatgtacgctcgtaatgttgatgatgcgaccgccctgcccttgtttcaccatctgacgagccgcaatttggctgcataagaatgcaccatcgacatcaacggtaaaaatcttgcgccactcatcaaaagccatatcaagaaacggcgctttggtcattgcacccgcattattcaccagcacatcaatgcgccccagccgttgaatgagtttctccagcgccagtgccccttctggtagattgccgagatccagctgcacgatctccgcacgtacgccgtggctaactacctcacgcgcggtatcttttgccccttcttcatcactgtgccaggtaataccaatatcaaacccctgctgcgccagtaataacgcgcactctttgccgatcccgctatcggaggcggtaataatcgcaacctgtgccatcgagttctccacttaacgctgaataaacgttaagtatagaaggcgcatatcatcagcgtttgtaccccccgcccaacgcaccagtgagttgaatggaggcatccagccactgcccttgcaataacaggccattggcccgctcacgcagcgcggggattctggcttcgctgacgcgggaaccagcaatgatgcccgcgttaaagcgcgcctgcgcaagacctaccacacgcaaggcatcgcgctcaatttgcgcctgatgctggtttttctccgccagtgtctgaacctgactggctgcccgcgccacgtcattcaccgcttcaaccaccgctttgttgtagctggcgatagacaagttgctttcggcttttgcgatatcgagattggcgttaagacgaccactatcgaaaatgggtagcgtcaggcctgccgtaacgcccatttgctgcgcggaatgacggaacagatcgcttaagtgcaacgcatcctgttgcaggaaggccatcaggttgatgtcaggataaaatgccgcttttgccgcatcaatggtgcttaggctactctcaacgtaccagtgcgccgcctgcaaatctgcccgccgggccagtaaggagtaccccagttcatcaggaagctggcttgccactttcggcaacgcgaccggtttaagcttcaaactctttgtctggttatttgtaagtgcgcttaaccgtgcctcaataattttcattttccccgcgacatcgttgagctgctgccgggttttgctggcattaatatcggtttccacaccttcaacactagaagtaatcccgttctgatatagctggcgatcggtcgcgataatggtgttctgctctttttctatttgctgcaagaccgtgtttaacgccgcctgggtttgccactcccagtacaggcgggctacgctgccagccagcaattggcgggtttgctcgcgttccgccgcccgtgctttaaccgtacccaggcgggcagtaacctccgcccgattctttccccagatatcgagatgccagcccgccgttaagccaaaagtaccgttggtgtaccacgggccggtcgtacctgcggccggatcgttcagagcaaacggccccattaagccttctgcgctcattttttgccgctccatatccgccgaaaagtcgatctgcggaccatcctgagtggcaactgccttcgcctgggcttcagctagctgaatgcgctgttcagccacctgcatatccggtgcgttctgtagtgcattgttaattaaggaagactgttgattatcgtgatactccagccaccattggctgtctggccaaccattttcagcgccgtgggtaatgcggtgtcaacttgtgcagcgggcgtttgctggcttaacgcctggcgggtttcatgcataggcgcacacccggccagcatcagtaacagcggaaaacaggcgatggctggataaaaggaatcacgattcatgggggaataatcaggtaagaaaaggtgcgcggagattaccgtgtgttgcgatatattttttagtttcgcgtggcaatacatcagtggcaataaaacgacatatccagaaaaatatacactaagtgaatgatatcttccgatttatcttaatcgtttatggataacggcaaagggcttcgttttttcctatacttattcagcactcacaaataaaggaacgccaatgaaaattatactctgggctgtattgattattttcctgattgggctactggtggtgactggcgtatttaagatgatattttaaaattaattaatgtcatcaggtccgaaaataacgagaatatttcagtctctcatcctgttgcgctcctgtcatgtgcattgcttcatataatcactggcgcaaggagcgcgcagggggcggccaatcgccgccgccccctgcacccccgggctctggcgaacaaaatcgccgctgcgcggtgccctcggcttatcccttacggctaccgggtcgggcgcgaggtaacatccctgtaaaacgcgccctcagcccacatccatgtgggctgccccggccttcagggaacgcctcggcaattttgacgccaccaaacaaccgtgcggcctattgataaagagctaacacattgtcaaaaaacatcactatggttttttagagtttctcgatatcaattgcctgaatagcccttgcaatatcaggggaattattcaacacccgaacatgctgaaataattccgttgcttcatcgtattctttacgcaaataactcaaccactgtttaatccgcgcaacgtgatataacccggtatcgccctgcttttccagacgggtatatttttgcagcaaagcaaccacctccggccacggcattcgcggttcgttatattttaccacccggctcaggttgggaatattgagcgccccgcgaccaatcatcactgcgtcgcagccgctgatcgccatgcattgttgcgcgctctgccagtcccagatttcaccgttggcaatcaccggaatattcagccgctggcgaatatcgccaatcgcctgccagtcaatatgctccgcgcggtaaccctgctctttcgtccgcccatgcaccaccagctccgtagcgccagcctgttgaaccgcatcggcgatttcaaatttcttctcaccgctgtcccagcccagacgcactttcacgctgacgggcaaatgcgccggtacagcttcacgcatcgcttttgcaccctggtagatgagttcaggatctttgagtaacgtcgccccgccgccgctaccgttaaccgttttgctcgggcagccgcaattgagatccacgccccaggaacctaactccaccgcacgggcggcgttctctgccagccattgtgggaactgacctaacaactgcacgcgcaccagcgtaccagatggtgtccggctggcgttttgtagctcagggcaaatgcgatgaaagacttttaccggcagcagttgatccaccacgcggacaaactcggtgatgcacagatcgtagtcgttaacttcggtcagcaattcacgcaccagagagtcaagcactccctccatcggtgccagtaacacacgcatatcatcacccgcaaaaaaatgaggcgctatgttagcgcctatggtcagcggattaaaggtctgcaaagagggattgctgcaaactgcaatccctctctatgcttgatgtatgcctgagttcgctgcgcattgcgtaatgccggggagcgaaaaaataagcgctgatttcttaatgtgatcggtagcacgttttacgaattaattgtatgatgaatccatctcatctggggtgttgattatgagtaagacactgaacattatctggcaatatttacgcgctttcgtcctgatttatgcctgcctgtatgcaggcattttcattgcttccctgctaccggtaaccattccgggcagcatcatcgggatgctgatcctgtttgtcctgctggccttgcaaattcttccggcaaaatgggtcaatccggggtgctacgtactgattcgctatatggcgctattgtttgtgccgattagcgtaggcgtcatgcaatattttgatttgctccgcgcacagtttggcccggtagtggtttcctgtgcagtcagtacgctggtggtttttctggtggtgagctggagtagccaactggtacacggtgaacgtaaagtcgtaggtcagaaaggaagtgaagaatgatggcgaatatctggtggagtttaccgctgacattgattgtcttttttgccgcccgcaaactggcggcacggtataagtttcccttgcttaacccgttgctggtagcaatggtggtgatcattccttttttaatgctgactggcatctcttacgacagctactttaaaggtagcgaagtgctaaacgatctgctgcaaccggcggtcgtcgcgctggcctatcctttatatgagcagctacaccagatccgcgcgcgctggaaaagcatcatcaccatctgttttatcggcagcgtggttgcgatggtgacggggacttccgtggcattgttgatgggcgctagtccggaaatcgccgcgagtatcctgccgaaaagtgtcaccacgcctattgcaatggcggttggcggcagtattggcggtattccggcaatcagcgcagtttgcgtgattttcgtcggcatcctcggcgcggtatttggccatacattgcttaatgcgatgcgtattcgtaccaaagctgcgcgcggtctggcaatggggactgccagccacgccctcggtacggcgcgctgcgccgagctggattatcaggaaggtgcatttagtagcctagcgctggtgttatgcgggataattactagcctgatcgcaccgttccttttcccgattattctggcagtaatgggctaaaatttgcgatgcgtcgcgcatttttgatgtatgtttcacgcgttgcataattaatgagattcagatcacatataaagccacaacgggttcgtaaactgttatcccattacatgattatgaggcaacgccatgcatccacgttttcaaaccgcttttgcccaacttgcggataacttgcaatctgcactggaacctattctggcagacaagtacttccccgctttgttgaccggggagcaagtcagtagcctgaagagcgcaacggggctggacgaagacgcgctggcattcgcactacttccgctggcggcggcctgtgcgcgtacgccattgagcaattttaatgttggcgcaattgcgcgcggtgtgagcggaacctggtatttcggtgccaatatggaatttattggtgcgacaatgcagcaaaccgttcatgccgaacaaagcgcgatcagccacgcctggttgagtggtgaaaaagcgcttgcagccatcaccgttaactacacgccttgtggtcactgccgtcagtttatgaatgaactgaacagcggtctggatctgcgtattcatctgccgggccgcgaggcacacgcgctgcgtgactatctgccagatgcctttgggccgaaagatctggagattaaaacgctgctgatggacgaacaggatcacggctatgcgctgacgggtgatgcgctttctcaggcagcgattgcggcggcaaaccgtagccacatgccttacagtaagagcccaagcggtgtcgcgctggaatgtaaagacggtcgtattttcagtggcagctacgctgaaaacgccgcattcaacccgactctgccaccgttgcagggagcgttaattctgttgaatctcaagggttatgattacccggatatccagcgcgcggttctggcagaaaaagccgatgcgccgttgattcagtgggatgccacctccgcaacgctgaaagctctcggctgtcacagtatcgaccgagtgcttctcgcttaagcctggtgccggatgcggcgtgaacgccttgtccggcttgccagccctctcctggtgtcgaaattcccggcaaacagtttgccgtttcttgcgcaaaaccagcgggtaaagtagcctgatggaaattttccttagatcgagtctcctgcatgttaaagcgcgtgttcctcagcctgttagtcctgatcggcttgctgctgttgactgtgctcggcctcgatcgctggatgagctggaaaaccgcgccttatatctacgacgaattgcaggatctcccctaccgccaggtcggtgtggtgctcggaacagcaaaatattatcgtactggcgtaattaatcagtattatcgctaccgcattcaaggagcgattaatgcctataacagcggtaaggtaaattatctattactgagcggcgataacgcattgcaaagttataatgagccgatgaccatgcgcaaagatttaatcgctgctggtgtcgacccaagtgatattgttctcgattacgcaggctttcgtacgctggattccatcgtgcgtacacgcaaagttttcgatactaatgatttcattattatcacccaacgtttccactgtgagcgagcattatttattgcgctgcatatggggattcaggctcagtgttatgccgtaccgagtccgaaagatatgctgagtgtacgtattcgtgaatttgccgcccgtttcggtgcgctggctgacctttatatttttaaacgtgaaccgcgttttttagggccgctggtccctattccggctatgcaccaggtaccggaagatgcgcaggggtatcccgccgtcacacccgaacagttacttgaattacaaaagaaacaaggaaagtaattatggatgtacagcagttttttgtcgttgccgtttttttccttatcccgatattttgtttccgcgaagcatggaaaggctggcgcgcaggcgcgattgataaacgggttaaaaatgcaccggaaccggtgtatgtctggcgagcaaaaaatcccggactctttttcgcttatatggtggcatatatcggcttcggaattttatctatcggcatgattgtttatcttattttctatcgttaatattcccctctccagttaattattgagaataattattacttcacctgataagctgcggatatcacattcctaaccgcagctatttgtgaatcttttcacagtttaaattcccccgcacgcttagccttaatatcagtacattattatttactaaacgctcgccttaattacctatagcattaaggaagatcacatgccgcaacaaaattatctggatgaactcactccggcttttacgtctttactggcgattaaagaagcctctcgctgtttattatgtcacgacgctccctgtagtcaggcttgcccggcacagaccgatccggggaaatttattcgcagtatctactttcgtaattttaaaggcgctgccgagacaattcgcgaaaataatgccctcggtgccgtttgtgccagagtgtgcccgacggagaaattatgccaaagcggttgtacccgtgccggtgttgatgctcccattgatatcggccgcttacagcgttttgttactgattttgaacaacaaaccggaatggaaatttatcagcccggtactaaaacgctcggcaaagtcgcgattattggcgcaggtcctgccggattgcaggccagtgtgacactgacaaaccagggttatgacgtcacgatttatgagaaagaagcgcaccccggtggctggttgcgtaacggtattccgcaattccggttaccgcaaagtgtgctggatgcagagatcgcccgtattgaaaaaatgggcgtgaccattaagtgcaacaacgaagtcggtaacacactcacccttgagcagctgaaagcagaaaaccgcgcggtactggtcaccgtggggttaagtagcggttccgggctaccgctgtttgagcatagtgacgttgagattgccgtcgacttcttgcaacgtgcacgacaggcgcaaggcgatatcagcattccacaaagcgcattaattatcggcggcggtgatgtcgcgatggacgtagccagcacgctgaaagttctcggctgtcaggcggtaacttgcgtagcgcgtgaagagttagatgagtttccggcaagcgaaaaagagtttaccagcgcccgggagctgggcgttagcatcatcgatggattcacgccagtagccgtggaaggcaataaagtcacgtttaagcatgtacggttaagcggcgaactgacgatggcggcagataaaattattctcgccgtcggtcagcatgccagactagatgcctttgcggagttagagccgcagcgtaacaccatcaaaacacaaaattaccagacccgcgacccgcaagtctttgctgctggcgatattgttgagggtgacaaaaccgtggtctatgccgtgaaaaccgggaaagaagccgccgaggcgattcatcactatttagagggagcttgcagttgttaaattaatatttagagggagcttgctcatgttaacgaaagatcttagcattactttttgcggcgtgaagtttcccaacccgttctgcctctcttctagcccggtaggcaactgctatgagatgtgtgccaaagcctacgacacaggttggggcggtgtggtgtttaaaacgatcggcttttttatcgccaacgaagtcagcccgcgttttgatcatctggtgaaagaagataccggttttatcggcttcaaaaatatggagcagattgctgaacatccgttggaagagaatctggccgccctgcgtcggctgaaggaagattacccggacaaagtattgatcgctagcatcatgggggaaaatgagcagcaatgggaggagctggcgcgcctggtgcaagaagctggcgcggatatgatcgagtgtaacttctcctgtccgcaaatgacttctcatgcgatgggtagcgatgtcgggcaaagcccggagctggtagaaaaatattgtcgggcagtgaaacggggttccacgctgccaatgctggcgaagatgacgccgaatatcggtgatatgtgcgaagtggcgctggcggcgaagcgcggcggcgcagatggcattgcggcgattaacaccgttaaatccatcaccaatatcgatcttaatcagaaaatcggtatgccgatcgttaacggaaaaagcagtatttccggatattccggtaaagcggtaaaaccgatcgccctgcgcttcattcagcaaatgcgcacccatccagaactgcgcgatttcccaatcagcggtatcggcggcattgaaacctgggaggatgcggctgagtttttattgctcggcgcagcaacgttacaggtgaccaccggcatcatgcagtacgggtatcggatagtggaagatatggcaagcgggttgagccattatctcgccgatcagggatttgatagcctgcaggagatggtaggtctggcgaataacaatattgtcccggcggaagatttagaccgcagttatattgtctatccccgtatcaatcttgataaatgtgttggctgtggacgctgttatatttcctgttacgacggcggtcaccaggcgatggaatggagcgagaaaacccgcacaccgcattgtaataccgagaaatgtgtgggttgtctgctttgtggtcacgtctgcccggtgggttgtattgagctcggggaagtgaagtttaagaaaggcgagaaagaacacccggtaacgttgtaaaaccagagacgcatccggcatttggttcctgtcgccggatgcggcttgaacgccttatccggcctacaaaaccatacaaatcagtatgttgagcttattgtaggccggataaaacgcgccagcgttgcatccggcatttggctcctgttgccggatgcggcgtgaacgccttatccggcctacaaaaccacacagatcatgatgttatgtgcgtttatgaccgaatgcggaccacattcacatcatttcttacgcgcgtatttcagactatccagcgctacggcgaagataataatcgcccctttgatgatgtactgccagtatgggtttacgccgatatacgtcaggccatagttgatgacggtaaaaataattaccccggtcaccacgccaatcaccgtccccacaccgccgctgaagcttacaccgcctaccacgcacgccgcgatagcatccagctcatacataaagccgaggttgttggtggcagagccgatacgtccggcttctaacatcccgccaaaggcatagaacacgccagacaacgcgtagatcatcagcaggttcaggccgacgttgacaccagatacttttgccgcttccgggttaccgccaatggcaaaaatgttcttaccgaagcgggttttgttccacaacacccagacgaacgccaccgcaatcaacgcgtagaaggtgatgtaagagagacggaaactccccagcgcgacaaagccctgagcaaaggtagagaagccactgtcaaaaccagaaattgggctcgccccgacaaagtcgtaatagaggctgttgatgccatagacgatgatcatcgtgccgagcgtggtaatgaacggcgtcacgttgagataagcgataatcagaccgttgatcaaaccgatcaccgcaccaatggcacagacaatcagaataaccagcgcaatcggcatcgtcgccatttccgggaacactttgttggcgttatccatggactgcaataatgtcgcagccaccactgccgccagccctacctgacgaccagcagaaagatcggtcccctgggtgacaattaaccctgccacaccgagcgcgataataatacgcacgctactctgggtgagaatattacttaagttcaacagacttaaaaatgttgggtcctggaaaataataatcgccagcaaaactaaaagaacgacgtaaataccgccctctttcaggtaagtaagaaaacttttcttatttaacgcactcatgggaagcccctaatcttaaaggtgcaaagacgcaagacgcagaatttcgttttgcgttgttgtttttgtatcgacaattccggaaacgagaccattgctcatgaccagaatacggtctgttatccctaacaactcaggcatttcagaggagataataataatccccttgcctttcttcgccagttcggcaattaactgataaatttcaaacttcgccccgacatcaataccgcgcgtcggttcatcgagcattaatatttctggttgcgttagtagccagcgaccaataatcaccttttgctgattaccaccggagaggctaccaatttgcgtccgatgacccggcgtttttacccgcatgctatcaatcacccactgggtatcgcttttcatccggctgttatccagtaaaccaactttatttttgtagttgcgaatattggaaattaagctgttaaaaccaatatccagataggcataaattcccgtactgcggcgctcctcagttaccagtgcaaatccatggtttatggcttcgttggcattatggttattgatctgtttgccgtgcaacgttatggtgccagcgcttttctcgcgaataccaaataacgtctcaacaatatcggtacgtttcgcccccaccagaccggcaataccgaggatctcccctttatgcagatcaaagctgacatcgcgaatgctcggctggcgcagactcgtcaggttacgtacctcgaggatgacttcgcccggtttgttttctttgtcagggaaacgctggttaagagaacgcccaaccatcatggcgatgatcttgtccatcgtcagtcctgccagcggttcggtggcgatccactgaccgtcgcgcaatacggtaacttcatcacataactggaagatttcttccattttatggctgatataaacaataccgcagccgcgctcttttaatttacgaataatagtgaacagatgattgacctctttttcggttaagctagaagtcggttcatccataatcacaattttcgcgttataggaaaacgctttggcgatttcgatcatctgcatttggctaacggataatgtgccgacgcgcgcacgcggatcgatatcaatatccagttcgtcaaaaatcgctttggtttcgcggtacattttgtcctgatcgacaaacatgcctttggtgggatatcgccccagccacatgttatccatcacgctacgttgtaataccaggtttaactcctggtgtaccatgctaataccattttccagggcttcttttgcagaatggaaatcgatctctttaccctggaataaaatggtgccggagtctttttgataaataccaaacaggcattttaataatgtgctttttcctgcaccgttttcccccattaatgcatggatagaatgtggccggacttttaaattaacgttatcaagtgccttaacaccaggaaaggacttgttgataccgctcatttccaacaagtattccccggaggacggagtcgtactgctgaccatataattttaccttgttggccatacaataagggcgcagtaatagactgcgcccaatcagtcttatttcttgctgaattcagccaggttgtctttatctacgccaacataaggtacgcggaccactttgttgtcgattttccagttggtgccatcagccgcacctttaccatcggccaggtttttcgccagatcaaaggtcgctttcgcctggttgttagcatcgttcagtacggtgcccgccagtgcaccggatttcaccagcgccagcgcttctggcagcgcatcgacgccaaacaccggaatgctggacttgttgtgtgctttcagcgcttcaaccgcgcccattgccatcgcatcgttgttggcgataaccacttcgattttgttggcgttcgggccagacagccaggcgtccatcttatctttcgcctgagcggtgtcccacattgcggtatctaactgtaactgttcagttttgatgcctttatcgttcaattctttaatcacgtaagtggtacgtgcttctgcatccggatggcccggttcacctttcagcagtacgaactgaatctgaccgtctttgttcagatcccaaccctgattcgccgcccagtgtttagcaatcaaatcgccttgaataatgccggactctttggagtcagtgccaacgtagtaggctttgtcgtagctatccagcgccttacgagacggttctttgttgaagaaaaccaccggcacgttttgcccacgcgctttctcaatcaccgtacccgcagctgccgggtcaaccaggttgattgccagtgccttcacccctttcgccagcaatacgtcgatctgatcgttctgcttggactggtcattctgagaatcattcatcagcagctgaacatctggcgcggctttcgcatcttgctcaatagccttgcgcactacagacataaagttatcgtcgtacttatagattgttacaccaatgcgagtatcagcagcgtgtgcagcggcaccgaataacatgctggccatcacagcagacagggttaacaccttcttattcatggtatctccggtttttcttatgcagggtagtgcttgagataaatgctcggcggggcagtagagttaatgaagtgttactgaacgccgaagctcactttttaaaattcgttcttccatgcccggtaacgctccagaaaacggctttaattgttgttatgacgctgttacctcggcaaaagtgattattcactgttacatacgggttacaacgttaaaacggtgcaatcatagctatcacattgttaagatactgtgaaatcactcacagattgaaagcggttacatcgcctgatttgtactgttagtgatcgccgccgcattctggcgtgttgcgacagaatggcgacgcactaacgtcggcataaaacagtggctggcacgaggatcaatattgcctgctgccccctgcaaggccagttcggtggctaatttcgccatactagcaatgggataacgcacggtcgttaattgcgggtcggtgtaacgggcgatgggaatatcatcgaaaccgatgatactgagatgtaacggaatcgcaatgccattatcttttaatgctgtcagtgcgccagcggccatattgtcgttataagcaaatacagcggtaagttgtagattgcgccccagcagttcaaccatcgccgcctcaccgcccggcatgtccggcgtaccagcgccaatccagctttccggcggaataatatcctgctctttcaacgcactcatccagcctgctttacgcatggcgtcatcttcaatgccgtggctggaagaaagataaccaatacgttgatgaccgttattcagcaacatgcgcgtcgccattcgggcaccgctgagattatccaggcaaacgcaacgatgggcgtaccccggcacaacgcggttgattaacaccataccgggaatgttatccataaattgcgccagttcatcgtcactcaatgctttactgtgaacaatcaacgcattacaacgctggcgaattaacacctcaatggcgtgacgctctttttccgcttcatgatagctattgccgattagcacgtatttctgatgctgctgagcgaccagatccaccgcttttaccagcgcgccgaaaaacgcatcagaaacgtccatcaccaccacgccaatggtgtcgctaacctgagttgccagcgcctgggcattggcgtttggccgataatccagctcactcacggctttcattactgcttcacgcgtgtcggcactgaccagcgtgctgttattgagcacccgggaaaccgttgccacagagacgccagcctgacgcgctacatcacgaatggtgatcatattcactacctgttatgagattgcagtaaatgactgcttgctggcggctattttgtcagcactgaatacaggacttcgtgaatcgagtcacagcaatggaaacggttacagccgttttgttaacgaatgtgatccagatcgttatctacttgttttagatattgccggtccggcagcacgcaaagttaactgacgccagagccattccaccggcccctggcggaagtaacgcagccagataacagagaagaggatattcgccagccataccggaataacaaacgccagcagctccaggcggtcaaaatgcataaacaaaccgaggtggtaaaaaagcgtggtacaaatcagcgtttgcaatagatagttggtcagcgccatccgtccgacgcaggcgatcgcaagcaccagcttaaagcggctcaattgcggccagaagccataaaacaggctcgcatagccaatcgcctgaaacggcgcactcagttcccgcggcatttgaagtaagaaggcacaccagcgatacgcccagtccagctgccattgcagggcgatggcaggaaggttaatggtcaccccaatcgccaccagcacaaaaccagtacgacgatagtgacgtaagctgaactgccctttcagccagccgctgcgcatcagcgccgcaccaatgagcatcatccctgccagttgccagccatactgtgcgcccagtgccagtaaactgttgccaacaccatcggcacgattactgatcgcttcaacgccgccgtgaagcttccagtatttttcatacaaaatagcgcttgcatccggcgtccaggcgcggctggtctggctgtcggaaatcagccccaataacagcaaaacgccaagccccaccagataaagcatgacgcctgtattaaacaggctttttacgcttggcgcatcgcgcaccagccgccagcagattaagcccaccagcccgtaagccagcaaaatatcgccgtcccagaacaataaaccgtgaataaagcccaacaagactaacagcgttaaccggctctggatccagcgtctgccacggggcagcaacatttgcaggcccgcaccaaacagtagcgcaaaaagcgtgaggaatttcacctggccgatgagatcaagaaatgcccaagtccatgcatcccgcggcgtaatagcaccgtaccaggcgggattgagataagccgcctttggtagcccaaaggcgctgatgtttaatagcaggatccccagaatggcgacgccgcgaacaaaatcgagcgtgacgttgcgctccatggttcctgccttttaatcagttgtgatgacgcacagcgcgcagaaactcgtggcgcgtattctgactggatttgaacaatccaccaagagaggtcgttgtcgtggcactggttgcatcgcggatgccacgcgccttcacgcagtaatgcaccgcgtcgatgctgacagccacgttattggtgcccagcagcgtttgtagcgcaataagaatttgctgcgtcagacgttcctgcacctgcggacgctgggcaaagaactgcacaatgcggttaattttactcagaccgatcacgctatctttcgggatataggccaccgtcgctttgccatcgatggtaacaaaatggtgttcacaggtgctggtcagagtgatatcgcgcacggtgaccatttcatcgaccttcattttgttttcaatgagggtgattttcgggaaattggcgtaatccagaccggagaaaatttcatcgacatacattttagcgatgcgatgcggcgtttccatcaaactgtcatcagccaggtcgagattcagcagctgcatgatttcggtcatatgaccagcaataaggcttttgcgcgtttcgttatccatttcatgcacgggcgggcgcagcggtgtttccagtcctcgcgcaactaacgcttcatgaaccagggccgcttctttactgagacttggcatttatgatttctcctgcaggtgtgacgcctccgccctgcgtgggggcaaagttattaagctgatttacagcctgattattgtgcgtgaggcggcgcacataatccagtattcacagcgataattattgtaattgccgctgcctttcatcagcagatgttaaaacatcgttatgcaaatacggaagtgaaagttactcacagcacattgaataaacggtatgatgaagaaattgcaaacaacacaacaaggagccacgcatggaaatgctcgaagagcaccgctgttttgaaggctggcagcaacgctggcgacacgactccagtaccttaaactgcccgatgacgttcagtatctttctccctccacctcgtgatcacactccgccaccagtgctgtactggctttccggattaacctgcaatgacgagaacttcaccaccaaggcgggtgcccagcgggtagcggcggaactggggattgtactggtgatgccagacaccagcccgcgcggcgaaaaggttgccaacgacgatggctacgatttaggccagggcgcaggcttttatcttaatgccacgcaaccgccgtgggcgacgcattaccggatgtatgattatctgcgcgatgaattaccggcgctggttcagagccaatttaatgtcagcgaccgctgcgccattagcggtcacagtatgggtggtcacggtgcgctgattatggcgctgaaaaatccgggtaaatacaccagcgttagcgcctttgcgccaattgtgaatccgtgcagcgtcccgtggggaatcaaagcgtttagcagctatttaggtgaggacaaaaatgcatggctggaatgggacagttgcgcactgatgtatgccagtaacgcgcaggatgcgatcccgacgcttatcgatcagggcgataatgatcagtttcttgccgaccagttgcaacctgcggtactggcagaagccgcgcgccagaaagcgtggccgatgacgctgcgtattcagccgggatatgatcacagttactacttcatcgcctcttttatagaggatcacctgcgcttccatgcgcagtatttactgaagtgaaagtccgcccggttcgccgggcatcttctcatcagaagcgataatccactgccataaagtaacgacgtccgtcttcgttatagctgtagtcgtcacgactgagatccttgtcgccaaggttcagcacgcctgcgcgcagtttgacgtctttagtcacctgccaggccgcgccggtattccagatggtataaccgcccggtgttttagccgtcgcgctgtcggcgcgtttctgcccggtatagtgcccagaaacatagaaactccagtcttccagcgccagcggtttccagtccagcgtaccgttagcagtatggaacggcagatcggatagcggtttgttttcgccgttgctgacatcacgaccatcgttgtaggtgtagttgatgctcagtttccattcatcgttgaacggaattttcagttcggtttccacgccctgaatacgagctttgttaacgttgtagtagctaaataccggtatgcgccgtccgttagcgcccgtctcaaaaccaacaaagttttggtagcccggtgcagcgttgacgtcagacgtacggctgatgctgatacgatctttcacatcgttacggaaaacggtaacgctggattcaaccccttccagccagccttcttcacccatgtagtaaagccccagctcccaactttcgctggtttctggtttcagatccgggctacccacaatcttacatgcgccacggcaggaattgctcgtccagtcagggctaagttgcaacagagaaggtgctttaaatgccgtcgcccagccccctttcaccgttacggtgtcggtggcgttataaaccaggtaggcacgcggactccagtgttcaccgtaggtttcgtgatcgtccatacgcacgccggtcgtcagcgccagcggctcgaagatccgccattcatcttccacaaacagcgcgtactggctggcagacgttttggagctggttcccccggtcaggttcaccgcatcgctaagtttgtcgtgacgccattcaccgccaaccgtgagaaactgattaatcgccgtcagcggcaacgtgtatttgccgtcgaccgtattgctttcggaagttatcgggctgctgttgccagggtttttgttctcgactttctcaccgtagtatttcagttcgctggtgccgtaatcccaacgcccattatggctgacggagtagttctggcgttccaggcggtttttgtccaggctgtcggaatcacgatcctgacggtcgaaaccgtatccggcagtaaaatcgtgattttgattcggtgtccaggcaaattcgacattgccgtcgcggctggagaatccttcaatacgcggcgtttctccggtatcggtggtcgtactgttttgcgggtcatccttttcacgttttgccaggctgccgtaagctttcattcccagcacaccatcaattaatggtccactggtaaagaactgaccgttataggtgtcaccgcgatcgcgatgttcctgaatggtggtatcgacggtaacggtaccgctccatttctgaccgatttttttggtgatgatattcactacaccgccgagcgcatcggaaccgtacaggctgctcatcgggccacggaccacttcaatacgttcgatggaatcgaccgggatccagttcagatcgaaatcattgtggcggaagacggcattgcgggagttcacgcgtttaccgtcgacgagaatcagggtatagctgctgtccagaccacgaatactaacgcccttacggttatccccttcgttcgtcagttgtacgccaggcacttctttgaggacatccttcagattctgtaccggttttcgctgcaggtcttcctgggtaatgacgctgatactggcaggtgcatctttaagattttgttccacggaagatgcagtgacaaccatcgtttcgccatcatcatcgaccgctaacacaggccatgcacaagaaatagcggacaaacacagcccgacccgtacgaaagggttcaacctaaacattccatatctccatgaggtaactacgaaaataaaatgggttatcgctcacatcttcttcacgtccccttgcgtacggcagcatcgcggtggacttattttttatgcaggtgatcatcccagaaagccggaacagcctctgatttgtcagccttttttgattgcggcgtaacgataatgcaaacgataacaattatcaatccaaatgttaaattttatatccgcatgatttgtcagggaaatggaattgaaaaagccctctcggttgagagggcttagcaaggaagggaggaaacttatttcttatcgttctgcgggaacttcatttcgctgtagcgtacgaagtgagttcctttaatcagcttgtagccgaaccaaataatcaggaacagcgggataccaatatacgttgccgctacgccgccccagtcaatagtatctttcaggaacgcttcgtagttctggcccaaagtgataatcagacacagaatgaatgcgaagatcggccccagtgggaagaaaccactacggtacggcagatcgttaatgtcgtgtccctgcaatacgtaaccgcgacggaagcgatagtggctaatggcaatccccagccaggcgataaaacccgtcatcccggaggtgttcagcagccacaggtataccgtctggttgccaaacatggaggtcaggaagcacagaccggcaatcaccgtcgtcgcatacagcgcattacgcggcacgccaccacggctcagtttagcgaaaatgcgcggcgctttaccgtcacacgccagggtgtacagcatacgagtagacgcatacataccggagttacccgcactcagcaccgccgtcagaataactgcgttcatcaccgccgccgcagagagcagacccgcgtgctggaacaccagggtgaacggactaacgctgatgtctttaacatcgttacgcagcaggctcggatcggtgtacggaataatcaggctgataatcaggatcgcgaacacatagaacaacaggattcgccagaacacctgacgtaccgcgcgtggaatgtttttcgccggatcttcggactcgcctgcagcaataccgatcagctcggttccctggaaagagaagccgacaatcatagctacgccgatcatcgccgcaaaaccaccagcaaacggcgcttcgccgattgtccagttgctccagcccgcaggctgcgcgcctttgaagataccgataatcatcagcacgccaacgatgataaagacaataactgtcgtgactttgatcagactgaaccagtattccgcttcaccaaagccacgaacactgatgtagttcagcaggaagataacgccgaggaacaacgcactccagatccagcccggtgtatccgggaaccaccagctcatgaccagctgagctgcaaccaggtcaacggcgatagtcaccgcccagttgtaccagtagttccagcccagcgcgaagccaaagccttcttcaacatagttctgaccgtaagtggcaaagctaccggaaaccggcatatatgcagccagttcaccgagactggtcatcaggaagtaaaccatcaggccaatcagcatatagctgagcaatgccccgcccggacctgcctgagaaatcgttgcgccagaggcaacaaaaagacctgtaccgatggaaccgccaatggcaatcatcgtcaggtgacgcgcctttaattcacggcgtaagcccggcgcttctgtggttttagtttcggaaaccatacaaaaatgctatccatcttaaaaatgaggcgcgattgtagcagacgattggcaatccttccggcagaaatacacggttataagacaccttcatgatcgcccagggattataagtaaagcagccaatctcttttctggcgaatgcatgctgaaggcgctgcgtcacgaaatcgacacagcaccagcatgttcttgtacagcaacttaacgcggcacatttgcgggatcgcaatagtccagaaagcgccgtagcgcgttggaaaggtgtttttgccgatgatgtatacgccacaacgtacgcatcaggcgcggcagagggaccgcaacttcacttaatgtgcctgcctgcaattgatcttcaatcacacgtcggctcaggcaactaattcccaacccatgacgcaccgcatgtttgattgcctcggagttacctaattccatcgccatctcaaacttcggtaaatgactcagcaacagataatcgacaatctcccgcgtgccggaaccgcgttcacgcaggatccacggcgcagcggccagctgttctaaggtgaccggaccacgggccaacgggctagtcggcgcggcgaaaaccaccagctcgtcttccagccacggttcagaaatgatttcagtgctgtggcacggtccttcaataaagccaatatcaacgcggaaatccagcaccgcttgcatcacgtcctggctattcccaacgctaagttcaatcggcaactgcggataatcatggcgataacgggcgataactgcaggcagaatgtagttaccgatggtactactggcatagatacgaatcgcgccgttgtcttcgcgaaacagttgttcgatttcaaccgcctgttcaagcaatgccaacgcacgcggatagagcagccgcccgtgttcattaacaaccagtcttttccccacgcgatcaaacagttgcacgccaagctgcccttccaggtcggtcaaggctgcgctcactgcactttggctcaacgccagcatcacgctcgcctgggtggtacttccacttttcaatacttctgcaaaaacttccaactgccggagggtgatgtgcatagtcgcttaccacttataaagattaattataaatatataatcaattttatttttaaaccagttagtcgtaaccttatgcccggttaaaggagagggttatgacgaatatcaccttacagaaacaacatcgtacactgtggcattttattccggggttagccctgagtgcagttatcaccggggtcgccctgtggggtggttccattcccgcggttgcgggtgccgggtttagtgccctcaccctcgcaatcttgttggggatggttttaggcaacaccatctatccgcacatctggaaaagctgtgacggtggtgtgctgtttgccaagcaatatttattacgtctgggtatcattctttatggcttccgtctgacgttcagccaaattgccgatgtcggtatcagtgggatcatcattgacgtgttgacgctgtccagtaccttcctgctggcttgcttcctggggcagaaagtgtttggtctggataagcacaccagctggttgatcggtgccggtagcagtatctgtggtgctgccgcggtactggcgactgagccggtagtgaaagcggaagccagtaaagtaaccgtggctgttgcaaccgttgttatcttcgggaccgtcgcgattttcctctacccggcgatatatccgctgatgtctcaatggtttagtccggaaactttcggtatctacattggttctactgtgcacgaagtggcgcaggtggtggcggcaggtcatgccatcagcccggatgcggaaaacgcagcagttatttccaaaatgctgcgcgtgatgatgctggctccgttcctcatcctgctggcggcgcgtgttaaacagctgtctggggcgaacagcggcgagaaaagcaaaatcactattccgtggtttgccatcttgttcatcgtagttgccatctttaacagcttccacctgttaccgcagagcgtggtgaacatgctggtaacgctggataccttcctgctggcaatggcgatggcggcgctgggtctgaccactcacgtcagcgcgctgaaaaaagctggggcgaaacctctgctgatggcactggtactgtttgcctggctgattgttggtggtggtgcgattaactatgtgattcaaagcgtcatcgcataaaccactacatcttgctcctgttaacccgctatcattaccgttttcctccagcgggtttaacaggagtcctcgcatgaaatacattggagcgcacgttagtgctgctggcggtctggcaaatgccgcaattcgcgccgccgaaatcgacgcaaccgcgtttgccttgttcaccaaaaaccaacgtcagtggcgtgccgcaccgctcacgacgcaaaccatcgatgaattcaaagccgcctgtgaaaaatatcactacacaagcgcgcaaattcttccccacgacagttatctgattaacctcggacatccggtcactgaagctctggaaaaaagccgcgatgcctttatagatgaaatgcagcgttgcgaacagctggggctttctttgctcaacttccaccctggcagccatctgatgcagattagtgaagaggattgccttgcgcgtattgccgaatccatcaacattgcgctggataaaactcaaggtgtgacagcggtgatagaaaacaccgccggtcagggcagtaacttagggtttaaattcgaacatctcgcggcgattatcgacggcgtggaagataaatcccgcgtcggcgtctgcattgatacctgccatgctttcgctgccgggtatgatttgcgtactccagccgaatgcgagaaaacattcgcggattttgcccgtactgtcggctttaagtatctgcgcgggatgcaccttaacgatgcgaaaagcacctttggcagccgcgttgaccgccatcatagcctcggtgaaggcaatatcggtcatgatgcgttccgctggatcatgcaggacgaccgtttcgacggcattccgctgatcctcgaaaccatcaacccggatatctgggcagaagagatcgcctggctgaaagcgcaacaaactgaaaaagcggtagcctgaagatgaataaccgggaaaaggagatccttgcaattttacggcgtaacccgctgattcagcagaacgaaattgcggacatgctgcaaatcagccgtagccgcgttgcggcgcatattatggatttaatgcgcaaaggccggattaaaggcaaaggttacattctcaccgagcaggaatactgcgtagtggtggggacaatcaatatggatattcgcgggatggcggatatccgttacccgcaaagcgcttctcatcccggtacaattcattgcagtgcgggcggcgtgggacgcaacatcgcccacaatctggcgctgttaggccgtgacgtccatttgcttagtgtgattggcgatgacttttatggcgaaatgctcctggaagaaacgcgccgtgccggcgtgaatgtctccggctgcgttcgtttgcatggtcaaagcacaagcacgtatctggcaattgccaatcgagacgatcaaaccgtgctggcgattaacgatacccatctgctggaacagttgacaccgcaactactgaacgggagccgcgatttacttcgtcatgcgggcgtggtactggctgattgcaacctgacagccgaggcgctggaatgggtctttaccctcgctgatgaaatcccggtgtttgtcgataccgttagtgaattcaaagcgggcaaaatcaaacactggctggcgcatattcacaccctgaaacccactttaccggagctggaaattttatggggacaggcgatcaccagcgatgctgaccgtaataccgcagtgaatgcattgcatcagcaaggtgttcagcaactgtttgtttatttgcccgatgagagtgtttattgcagcgaaaaggatggagaacaatttttgctgaccgcgccagcgcatacgacagtagacagttttggtgctgacgatggttttatggcgggcctggtatatagctttcttgaaggatacagtttccgcgacagcgcccgttttgcggtagcctgcgcggcaattagccgcgccagcggcagcttaaacaaccctaccctgtctgccgataacgcgcttagtttagtgccaatggtgtaacaatgttgccggatgcgacgcttaacgcgtcttatccggcctacaaatcaggcaatttcagcaagtaaatgtaggcctgataagcttgcgcatcaggcaatgacactcaagctaaaccaataaagaacccggcaatggtcgcactcatcaagttggaaagcgtcgccgccgccagcgcccgtaaaccaagctgggcgatttccggcgcacggtgtggcgcaaccgcagaaaacgcccccaccaccaccccgatagaaccaaagttagcgaaaccgcacaacgcgaaggaaataatcgccacagttttagcatcgagagtgccagccgtttgcagatagggactgaaattgagataagcgacaaattcatttattgccagtttctgtccaatcaaactcccggcaagattcgcatcactccagtccacacccatcacccacgccagtggagccagcaggtaacctaaaatggactccaggctggcatgttcaaaaccaaaccagccaccaacgccgccgataataccgttaatcaacgcaattattgcaacaaatgccatcaccactgttgccacacctgcggcgattttcagcccggtcattgcccctgtcgcagcggcttcaataatgctttttggcggtgtttcggtgaaagagaggttattaaaggaaacctggctagattccgttgccgggcttaacaggcgggcaaacaagatcccgccagggatcgccattaaacttgccgccagcagatattccacaggcacgcccagtgcggcgtaaccaatcattgtgctaccagcaatgctggccatgccactacaaatcgctgtaaataattcattgcgattcagacgatcgataaagggtttgacgattgccggaatttcgttttgcccgaggaaaatggtggtgaccgcgacgaaactctcgatcttgctgatatttaatgctttctggaagataccgccgagaattcgaattaaaatccccatcacaccgatgtagtagagaatactcaccagcgcggtgacgaagataattgccggtaacaccctgaaaccaaagataaatcctgcaccatcaaataaggtatccattttcggtccgaccagagaaccgaagataaatgcgctacccgcgtcgctgtacgccatcactttatgcacgccaaaagcgactttttcagcgacccaacgccctggcggtaaccaaagcataatgccgccaatcacgacctgtaacactaacgccgcgccaacggtacgcaggctgatcttcttcttgtttacactcagtaaaaacgcaatcgtcagcaataccaccattcccagaacacttctcatgacatccatagtgattatctcttcatgtcatattgggcgacggctttctgcccatcagaaatagccaggcctgcatcttgcgataccggcccggcttgttatcaacacttaatgggttttgatgtagccgcgcacgcactcttcgactaatccccagaaccagtctgtatcaatagtgatgccgactttggtattggcgggcttgccaagaacgcccagctcgtcgcagacggtacgcccatagcaagggccactgttgacgtccacttcgacgtacatctcctgggttttaatgccatcagggttaatcagataaccgatgcaggtggcgtcgtgcaccgggccgccagcaaggccgtagttttcgaactgcgttttgagagtgaagttcatgatgtcgctgaacagctctccggcggggccgcctgccctttccatccgagcaatcacgtccggggtgcaaacggtctggttggtgagatcgaggcccatcatcactaatggaacgccggaggtgaacactacgcgtgcggcttccgggtcggcaaagatgttgaactcggcagatggcgtgaagttgcctgtaccgtaagcgccgcccattagcacaatttcacggattttgggcaggatcgcgggttgcatacgcattgccaccgcgatattactaagcggaccaaccggcaccagagtgatatcgccatcgcttgccatcagggtatcaatgatatatttcaccgcatgagtgctttctgcctggcgggtcagcggctcgaataccgggccatccagtccggtttcaccgtgaatattatcggcaacgatttgttgacgcataatgggctgcggcatccccgcataaaccggaacattaatctccagtttctggcaaacattcaggccattaattaatgttttatcaagcgtctgattacccgctacaatagtgatgcctaataaatctattgccggatgtttcgccgccatcattatagcaatagcatcatcatgacccggatcacaatccagaataatttttctcttttccattgtttatttcctctgtttccagttgcgttattttttctacagcaaagaaaattcgaccgggccgatgattgaatcttaacaacagcgtacgtatgctaaatatgagaaatctcatagcggataaacatcgtgaaagaaatccacaataatgatcttaagcagcaattgatgagtgaatccgcgtttaaggattgctttttaacggatgttagtgccgatacgcggctgtttcattttttagcgcgtgactacattgtgcaggaagggcaacagccgtcctggctgttttacctgacgcgaggccgcgccaggctttacgccacgctagctaatggtcgcgtgagcctgatcgatttctttgccgccccctgttttattggcgagattgagttaatcgataaagaccatgaaccgcgtgcggtgcaggctattgaagagtgttggtgccttgcgctccctatgaaacattaccgtccgctgttattaaacgacacgctatttttacgaaaactctgcgtcaccttaagtcataaaaattatcgtaatattgtttctttaactcagaatcaaagttttccgttagtgaatcgcctggcagcatttatattactcagccaggaaggtgatctttatcacgaaaagcatacgcaagcggcagagtatttaggcgtttcttatcgacatcttttatatgttctcgcgcagttcattcacgacggtttattaattaaaagcaagaaagggtatctcattaaaaacagaaagcagttgagtggactggcgctggagatggacccggagaataaattctccgggatgatgcagtaaaaattattttcaatagcgcgattgccggatgcaacgcttaatacgttttatccggtctacaaatcgagcattacgccagaccaataaagaacccggcaatagtcgcactcatcaggttggaaagcgttgctgctgccagcgcccgtaaaccaagctgggcgatttccggcgcgcgttttgggctaatagcgctaaatgcgccaacgacaacaccgatagaaccaaagttagcaaaaccacaaagcgcaaaggagataatcgcaatggttttcacttccagcgtgccgcccgtttgcaggtatggggagaaactcaggtaagcgacgaattcgttaatcgccagtttctgcccaatcaggctacccgcaagattggcatcactccagtccacacccatgatccacgccagcggtgccagcacatagccaaaaatactttccagagaggcattggcgaaaccaaaccagccgccaattccgccgataatgccgttgatcagcgcaataattgcgacaaacgccattaccaccgtcgccacaccagcggcgatttttagcccggtcatcgcaccgctcgccgccgcttcgataaagctttttggcggcgtttcgctgaagctcagattttcaaatgtgacctggctaggctcggttgccgggctaagaatacgtgcaaacaaaatcccgccagggatcgccatcaggcttgccgctaacaggtagtcaattggtacgcccattccggcataaccaatcatcatgctaccagcaatggacgccatcccgctacaaattgcggtaaacaactcgttgcgattcatgcgatcgataaacggtttaacgatcgccgggatctcattttgcccgaggaaaatagtagtaaccgcaacaaaagattcgattttgctgatgttgagggctttctggaaaatgctgccaaggatgcgaatcagcagccccatcacgccaatgtagtacagcagactgatgagcgcagtaacgaaaataatcgccggaagtacgcgaaaggcgaagataaaacccgcaccgtcaaacaggacatccattttcggcccaaccaggctaccaaaaatgaaggcgctaccggcatcactgtaagacatcactttatgaacgcctaatgccgcctgttctactgcccattttcccggtgggaagtagagcatgatgccaccaatagcgatttgcagcagcagtgcggctccaaccgtgcgcaaactgatgctctttttattcacactcaacagaaatgctattgccagtaacaccaccatccccacaacacttctcattatatccataatgattttcccttcatgccggtaaacccggcgtcagcgccaggttttggtatgcttgatgagtacgggcgacggctttctgcccgtcagaaattaacccgcgagacgctgatattctttggcaatttcgctcgccagaatggcgttgttgaacaccagctggatgttggatttcaggctgtcaccgccggtcagttcagcaacgcgcgccagcaggaatggcgtactttctttaccaatgactccctgagcttcagcttcagctaccgcctgatcgatcgccgcattgatagtgtgttccggcatagcaaactgttccgggatcgggttcgctaccacgaggccaccgttcagaccgctttgccatttcaccaccattgcacgggcaatttcgctggcgctgtcgagacgaatgctgacgtcaaacgggctggtgcggcagaaaaacgcaggcagcgctttagtctgatagccaattaacggcacaccgaaggtttctaaatactcagtggttaatcctaaatcgagaatagatttcgccccggcacaaacaacggtgacattagtatttgccagttcttgcaaatcggcagaaatatcgaaggtatgttccgccccgcgatgcacaccaccaattcccccggtggcaaatactttaattccggcaagcgccgcaataatcatcgtactagccacagtggttgcgccattttttccggcggcaacaacaaaaggtaaatcgcgacgactaactttggtcacgttatgcccttcacgacccagtaattcaatttcttctttgcttaaccccactttcatcacgccgccaataatggcgatcgtggcaggtacagcgccctgtttacgaatagtttcttcaacttcaattgcggtctgggcattttgtgggaacggcatcccgtgagaaataatggtgctttccagcgccacaaccggttttttgttttttaaagcgtcctgcacttccggggaaatttgtaataattcaggggaaatttttaattcagacattctgcgttctccactaagcttataacgttggcaatgcttaaatcggggttattggtgtattcacaggagagcgccatactgctacatccctgtgcgaaacgaacagattcggcaaacggcattccgtctacccaacagctagcaagtcccgccatcatggcatcgcccgctccggtaacattaataacattggttttgatcggcgcagaccagccactttcaccgctgatatcgctgtaataaacgccgtcgccgcccatgctcaataccagtcggttcaggccatgttgatggaaccaggcagcaacttttgccacatcttcacgcccactcagcgcaatcccactcagggtttccgcttcaaggcggtttggcttgagagtgtggatctgatttagacggtcgcgcactttgacacatttccatgcgctaaccggatcgacaaatacgggtacgttggcggcattatccagaatccatgccagtgcctcttcactgatattacagtccgcgacaatgacctttgccctctgaataaattcaccgtgctgtgcgagatattcagctgtaatagcgttgctaatattcatgtcatttatagcaaccagcatttcaccggtattatcgagtaaacttaaataactgctcgtattttctcccggcacaatcaggcatttatcgacataaacgccagattgattggtttgcgttagcaggctttgaccataaaaatcactgcctacggcgctcagtagccaggctttgttacccagcaacgccaggttttgtgcaatattgcgccctactccaccaggcgtaaattttattttacctggattactatccgcataatttaaactttcatgactatatccggcgacatcaatattcgcgctacctataattacgacataatccttttcgcgcatagcacgtcctctggtaaaaaattaccaaccctgtcaatccacaagaatatagatactgcaaagacggtttaaacatgtgttcatatttaaacatgtgctcatagtatgcatgttttacgtaaagtaaattaccgccagagaggcaaaatgggcagatttgagcaggctcacaaaatgcgattaaatgcctgaattacaaaagcgaggaatttgtgacgggatgcacagaacagaacaataaaaaagggcagaaaataatctgcccttgaggaaataacctgagtgtttgatgaacgtttgaagtttctactgaaagataaaaccatttaaattcataaaattacattcacaaaccggtcattctctttgcgctcatcaaatgttacaggacaggaaatttctgccctgtaacacaccttttattacgctgctttcgctactgcgtccacttccggacgtttcaggaaggcataggccaaacccgccaccagcgtaccggcaataattgctaccaggtaacccaataccggcgtaatagcgccagggatcagcagaacaaacagaccaccgtgcggtgccatcagtttcgcaccaatcgccatactgattgcgccagtcagcgccccacccacgatacagcacggcagcacacgcatcggatcacgagcagcaaacggaattgcaccttcgctaatgaagcacagtcccaataccagagcggctttgccaccttcctgctgcgctttgtcgaatttgcgacgcgccaccattgttgccagacccattgccagcggtggcaccatacctgccgccataatcgccgccatcgggccataggtttgagtactcagcagacccacaccgaatgcgtacgctgctttgtttaccggaccgcccatgtcagtacacatcatgccaccgaggatcgcccccagcagaaccgcattcgcagtccccatggtctgcagccagtgagtcagcccttcgagaatgccagcaactggtttaccgatcaggtagatcatcgccagaccgaccaccagactggaaattagcggaatgatcaggatcggtttcagcgcctccatactctgtggcagtttcaattgcgtactgattaacttcgcaatgtaaccagccaggaagcccgcaataataccaccaatgaagccagaaccggtgctgaccgccagcataccgccaatcagacccggagtgaggcccggacgatcggcaatggaaaaggcaatataacctgccagtaccggcaccatcagcgcaaaggcactaccaccaccaatctgcatcagcgccgcagccaacgtacccggctctttaaacgcttcgataccaaaagcaaaagaaagcgcgatacacagaccacctgcaacgaccatcggcagcatgtaagaaacgcccgtcagcaagtgacggtatgcgcctgcactctctttcttactttcagtggtcgccgtttgagctttgcccgccggttcatacggcgttgcttcagcaaccgctttatccagttcctgcgcggttttcttcagcgccagaccggtagaggtacgatacatcggtttaccagcaaatttcgccagatccacttcgatatctgccgccacaatcaccagatccgctgctgcgacttcttcgggagtgattgcattacccgcgccaacagaaccacgggtttcaactttcacccaccagccacgttttttcgcttcggtttcaatggcttcagccgccataaaggtgtgtgctacgccagtcgggcaagcagtcaccgcaactacgcgtttcggaccgctggcggcaactggtgctgtcgcagcgaccggcgcagtgtaaggtttcgcatggcctttggcttcactcaggaacagctcagggtgcgcaactgcccgggaaatatcgcccagccagacatttttaccgttcagcgcgctgtcgttcgggatggaatcaccgagaacaatcgccatttcagcgtcgttcggattgtcgatgatttccagttttgcttttcgcgccgccgcgcccagcagggtcttcgccatataggcgcgtgcctgaccgagattagcgtcaataatcagcagcgttttcattatgcctctcctgctgtcagttaaaaggttgtaagtcgacgcgcgccatcattgcggccaactgcggacgatcggtaatacccacattgctttgacttaccgccagggctgcaacagctgtcgccagacgcagtgtgtgttcactggattcacgcatcagcaagccataaatcaggccaccaaccatagaatcccctgcgccaacggtgcttacgacatcgacactcggtggtttggcgatccattcgccggaggcattaacccaaagcgcgccttcggcacccagactaataacaacatgcgcgatgccttgttcacgtagcgcatgtgcagcttcaatcacatctttcatttcaggcagtttacggcctgcccagatttccagctcgcggcggttaggtttcaccagccacggtgccgctttcaaacctgctactaacgcttcacggctactatcaaagataatgcaaggacactgactacgcaggcgagtcatccagtcggtgaacgcttccgggctgacgccactcggtaagcttccgctgacacagaccatatcgaactgaccgagccagctcagagaatcagtcacaaagcgttcccagtcggcgggggtgacttcaaaaccgctgaagttgaagtcggtcacttcgccgtctttttccgtcagcttaacgttaattcgggtgcgcccctgtacaacctggaaacggttggcaatgcccagctcgctgaacagttgctgaaaaccatcctgattgtctttacccaggaagccgccaacggtgacatcaattcccaggtcttttaatactttggccacgttgatgcctttacccgccgcatgcagaccggtggttttcaccaggttcacttcgccgcgttcaatttccgggcagaaaccaacaaggtcataagccggattaagggtgatagtagcaacacgtctgctcattatgcgccctccccaagaccagcagcgatagcgtcgccgattgctttcagcgcctgttcagcatctgcaccctgggcggtaaagcgtaggcgatgacctttcttaacgccaagtgccacaactttcatcagactacgtccgtttgccggtttgccggtaccatcaaggtttgtcacggtaatatcactgttaaattgtttaatggtattgaccagcatggtacctggacgagcatgcaggccgtgttcattgcgcaccacaaactccgcgcttaacacgtcgtcggtcggcgcatcatcgctggtcagcagcgccagcaacgttgccgcatccgctttcagcaagcggtcagctttattgtcgagcaataaatcagcgagacgcttaagaaccgcgatgggctgatcgtcattcatcgccacactcaccagcatggctgccgtttcgccgtccacatcaaaagcatttgccgcacggcttaccgcaatcgcgctacgcagattgccttcggcgctatcgctcagccagataccctgtccgagattcagcggttgttcattgatggctttggtgacgaaagtggcgtcaactgcccccgcctctttcagacgcgcagcgttcagcgcctgaagagtcagcagatcgctggcgacgatatccagtgtcagcatttcgttgtcgagcttcagctgctcactctgcttttcgcccatcagtaatgcgcgaagttcttctgctgttgttgcactcttcagttgttcagcaacggaatcatcgctcagtacgtgggtcagctggcgtagcaggcccagatgttcatcgctgctggcagcaataccgattgccacgtacgctacctgaccgtcaccccaggtgacgccttccgggaactgaaatacctgaacgccggttttcagcacctgatcgcgggtgtcggtagtgccgtgtggaatagcaataccattgccgaggaacgtactggtttgctgttcgcgcgccagcatgccattgacgtagccttctgctacattaccggcctgcaccagcgccgcagcgacctggcgaatcgcctcttctttgtctccggccttttcgcccggatggatgtcctgtacggataactggaacatagttctcctctcttgctgaattgaaacgattcagcctctatgagaaaaaaagcgccaacctggcttagggttaaagacaagatcgcgctgaaacgtttcaagaaagcataatacttctgtttcagcacgcaaggaaagccgtaaagttatgagcaaaagtttgatgtgctgcacaattttttgccatttttcctaattgctgatgggaaaatccgttatcagcaatttcatttcagcagcgtcagcagccaatcagcaacagtgaaatggcattttgactattcgtggcgcttttgatttcgctgtctgtttattttctgacaagcagcgtaaactccgcgtcttcctcttccagtgatcgaccagcatgcataactcccccgcagtctccagcgcgaaaagctttgacctgaccagcacggcgtttttaatcgttgcctttctcaccggtattgcgggcgctctgcaaaccccgacactcagtatttttcttaccgatgaagtacatgcccgtccggcgatggtgggattcttctttaccggcagcgctgtcattgggattctggtaagtcagtttctcgccgggcgctctgataagcgcggcgatcgcaaaagcctgattgtcttttgctgcctgttaggcgtgctggcctgcaccctttttgcctggaatcgcaactactttgttttgctattcgttggcgtctttcttagcagctttggcagcaccgctaacccgcaaatgtttgcccttgcccgtgaacatgccgacaaaaccggacgtgaggcggtgatgttcagctcttttttacgcgctcaggttagtctggcatgggtcattggcccaccgctggcttatgccttagcgatgggtttcagctttacggtaatgtatctgagcgcagcggtagcgtttattgtttgcggtgtgatggtgtggctgtttttaccgagcatgcgaaaagagcttccgctggcgaccggcacgatcgaagcgccgcgccgtaaccgtcgcgatacgctgctgctgtttgtcatttgtacattgatgtggggcagcaacagcctgtacatcatcaacatgccgctatttattatcaacgaactgcatcttcccgagaaactggccggtgtgatgatggggaccgccgccgggctggaaatcccgacgatgttgattgccggatatttcgccaaacgtctgggtaagcgtttcttaatgcgcgttgctgccgtgggtggcgtctgtttttacgcaggaatgctgatggcgcatagtcctgtcattctgttgggcttgcagctgctaaatgctatttttattggcattctgggcggcatcgggatgctctattttcaggatctgatgcccggtcaggcgggtagtgccaccacgctctataccaacactagccgcgtgggctggatcatcgcaggaagtgtggcgggcatcgtcgccgagatctggaattatcacgctgtgttctggtttgcgatggtgatgattatcgccactctgttttgcttactgcggattaaagatgtttaaggcgcggtcagcatttccagatcgataagccaggtcatggcctgctgacggctgttaccgcacatttcagcgctggcttgtaagcctgcacagactttcggtcgcagtgggctggtgaaaattttacagcgttgctgttcatcaagctgaatgcagggcgtattggcgggcttgccatctggcataccgggaatagggctggaaatactaggggcagtgcaacacgccccgcaacccggacggcattccatacgttgttctcttaaggttaaccaccggattgatgagcgcgcacagtaccaccttttttgcaccagcaaaagtgcgaataccacttgcccgaaaggcccgtcgcgagtactttgtcgcgatatttttgacattttcgactacaggaatttttcgatgccaagagcgaacgaaattaaaaaaggtatggtactgaattacaacggcaaactgctgctggttaaggatattgatattcagagccccactgcccgcggtgccgctacgctgtacaaaatgcgtttttctgatgtccgtaccgggctgaaagtagaagagcgtttcaaaggtgatgatatcgttgacaccgtgacgctgacccgccgttacgttgacttctcctatgtcgatggcaacgaatatgtctttatggataaagaagactataccccgtataccttcaccaaagatcagattgaagaagagttgctgtttatgccagagggcggcatgccggacatgcaggtgctgacctgggacggtcaactgctggcgcttgagctgccgcagaccgttgatctggaaatcgttgaaaccgcaccaggcatcaaaggggcatctgccagcgcccgtaacaaaccggcgacattgagcactggtctggtgattcaggtaccagaatacttaagcccgggcgaaaaaattcgtatccatatcgaagaacgccgttatatggggcgtgctgactaacttcagccgcatgcagaaaagggatagctcaggctgtcccttttttaatttattataccaatcttctattttgcgcttcctgaacaccttacgccctcaattttcactcgttgattgatcgccctcacacttcatcgcattaacaatccagaccaatttcaattgctgtcatataactttacactgtcgttgttaattaatcgttactaagacgtgactcctatgaatacaatcgcctccgttacgctcccgcatcatgtacacgctccacgctatgatcgccagcagttgcaaagtcgtatcgttcattttggctttggagcctttcaccgcgctcatcaggcgttactgaccgatcgtgtgctgaatgcccagggcggcgactgggggatctgtgaaatcagcttgttcagcggtgatcaactgatgagccagctccgcgcacagaaccatttatataccgtgctggagaaaggtgcggacggcaatcaggtgataattgtcggtgccgttcacgaatgccttaatgcaaaactggattccttagcggcaattattgagaaattttgcgagccacaggtggcaattgtttccctgacgattaccgaaaaaggctattgtattgacccggccaccggtgcactcgacaccagtaatccgcggattattcacgatctacaaacccctgaagaacctcactccgcaccgggtattctcgtcgaagcactgaaacgccgccgtgagcgcggccttacaccgtttaccgtgctctcctgcgacaatattcccgacaatggtcatgtggtgaaaaacgcggtgctgggaatggcagaaaaacgtagcccagaactcgccgggtggataaaagagcacgtcagttttccgggaaccatggtcgaccgcattgttccggctgcaaccgacgaaagtctggtggaaatcagccagcatctgggggtgaatgatccctgcgcgattagctgcgaaccgtttatccagtgggtggtggaagataacttcgtcgctgggcgtcctgcctgggaagtcgcaggtgtacaaatggtgaatgatgtcctgccatgggaagagatgaaactgcggatgcttaatggcagccactcttttctcgcttatctgggttacctcagtggattcgcccatatcagtgattgcatgcaggatcgcgcatttcgccatgccgccagaacattaatgctggatgagcaagcgccgacactgcaaattaaagatgtcgatttaacacaatatgcggataagttaattgcacgttttgctaatccggcgctgaaacataagacctggcaaatcgcgatggatggcagccagaaattaccgcaacgcatgctggcaggtattcgcatacatcaggggcgcgaaacggactggagcttgctggcattaggcgttgcaggctggatgcgttacgtcagcggcgttgatgatgccggaaatgccattgatgttcgcgatccgcttagcgataaaattcgcgaacttgttgcgggcagcagcagtgaacaacgcgtaaccgccctgctttccctgcgtgaagttttcggtgatgatctgccagataacccgcattttgtgcaggccatcgaacaagcctggcaacaaatcgtacaattcggcgcacatcaggcgctattaaacaccctcaaaatttaacgatttctgcggttaaagcggatgaagctcaccttcgtccgctctccccttctcttttctgccttttttagccaggattaacgctcagttaacttaccagagtattgcggagccgttgtgaccaggaccaacctcatcaccggttttctcggcagcgggaaaaccacgagcattcttcatctgttagcccataaagatcccaacgaaaaatgggcggtactggttaatgaatttggggaagtcggaattgatggtgctttgctcgccgatagcggcgcattgctgaaagagatccccggcggctgcatgtgctgcgttaatggtttacccatgcaggtagggttgaataccttactgcgtcagggaaaaccagaccgcttgttgatagagccgaccgggctgggccatccgaaacagatcctcgatctgttaaccgcaccagtctatgaaccgtggatagatctgcgcgccaccttgtgcattctcgatccgcgcttgctgctggacgaaaaaagcgccagcaatgaaaacttccgtgaccagctggctgccgcagacatcattgtcgccaataaatccgaccgtacgacgcccgaaagtgagcaagcgctacagcgttggtggcagcaaaatggtggcgatcgacaattaattcacagtgagcatgggaaagttgacggtcatcttctggatttgccgcgtcgcaatttagccgagttgcccgccagcgccgcgcattctcatcagcatgtcgtgaaaaaagggttagcagcgttaagcctgccagagcatcaacgctggcgtcgcagtctgaacagcgggcaaggatatcaggcctgcggctggatattcgacgctgatacggtattcgacaccattggcattctggaatgggcgcgacttgcaccggtggaacgcgtcaaaggcgtgctgcgtattcccgaagggctggtgcgaatcaaccgtcagggcgatgacctgcacattgaaacgcaaaacgttgcgccaccggacagccgtattgagctgatttccagcagcgaagctgactggaatgccttgcagagcgcgctgttgaagcttcgtttagcgactaccgcgtaaggttgcctgcgtttttcagtaagataattagagaaaatatgattaaaaatttgccgcaaatagtgttgttgaatattgtcggcctcgcgctgtttctttcctggtatatccccgttaatcatggattctggttgccgattgatgcggatattttttatttctttaatcagaaactggtcgaaagtaaggcctttttgtggctggttgcattgaccaacaatcgcgccttcgacggttgtagtctgctggcgatgggtatgttgatgctgagtttctggctgaaagaaaacgcccctggcagacgacgtatcgtgattattggtctggtcatgctattaactgcagtggtattaaaccagctgggtcaggcattaattcctgtaaaacgggccagcccaacattgacttttaccgatattaaccgcgtcagcgaactgctctctgttcccacgaaagatgccagtcgagatagctttcccggcgatcacggcatgatgctgcttatttttagcgcattcatgtggcgttatttcggcaaagttgcaggccttatcgcccttattatttttgtggtttttgcatttcccagagtaatgattggcgcacactggtttactgacatcattgtcggtagcatgaccgtgatattgatcggtttgccctgggtgttgctgacgccattaagtgatcgattaatcaccttttttgacaaaagtctaccaggaaaaaacaaacatttccaaaacaaataactcacagtaattaacatcatcagggttatttttatagtgaggataatcctgatgatgcgcaccgtgctttcatctatcgaacgcaaaaatcattctctaagtaaatgaatggattgcatgcgtttcactcaattgtactttaattgaccaaccccgcttattaactttctgtatcactttttcttataaaaaatcatgtaaaaccgctcgccaagaccgcaccaatcgggtaatctcgaactcgttttgcctcggcggtagattatcctcacagcatataattttgtgcgttagtccacagatttggccttaaggaattgtttcaacatgcccaggtaattagtctcgtgtcgcttggcatttttttataacgatatttgtcgttaaggacttcaagggaaaacaaacaacatggtcaaatctcaaccgattttgagatatatcttgcgcgggattcccgcgattgcagtagcggttctgctttctgcatgtagtgcaaataacaccgcaaagaatatgcatcctgagacacgtgcagtgggtagtgaaacaagtagtctgcaagcttctcaggatgaatttgaaaacctggttcgtaatgtcgacgtaaaaagccgaattatggatcagtatgctgactggaaaggcgtacgttatcgtctgggcggcagcactaaaaaaggtatcgattgttctggtttcgtacagcgtacattccgtgagcaatttggcttagaacttccgcgtagcacttacgaacagcaggaaatgggtaaatctgtttcccgcagtaatttgcgtacgggtgatttagttctgttccgtgccggtagtacgggacgccatgtcggtatttatatcggcaacaatcagtttgtccatgcttccaccagcagtggtgttattatttccagcatgaatgaaccgtactggaagaagcgttacaacgaagcacgccgggttctcagccgcagctaataaaccgtttggatgcaatcccttggctatcctgacgagttaactgaaagcactgcttaggcagtgcttttttgttttcattcatcagagaaaatgatgtttccgcgtcttgatccaggctatagtccggtcattgttatcttttaaatgttgtcgtaatttcaggaaattaacggaatcatgttcatacgcgctcccaattttggacgtaagctcctgcttacctgcattgttgcaggcgtaatgattgcgatactggtgagttgccttcagtttttagtggcctggcataagcacgaagtcaaatacgacacactgattaccgacgtacaaaagtatctcgatacctattttgccgacctgaaatccactactgaccggctccagccgctgaccttagatacctgccagcaagctaaccccgaactgaccgcccgcgcagcgtttagcatgaatgtccgaacgtttgtgctggtgaaagataaaaaaacattctgtagttctgcgaccggtgagatggacattccactcaatgaattgattccggcgctcgacattaataaaaacgtcgatatggcgatcttacccggcacgccgatggtgccgaacaaacccgcaatcgtcatctggtatcgcaaccctttgctgaaaaatagcggcgtctttgccgctctgaatctcaacctgacgcctagtctcttttatagtagtcggcaggaagattacgatggcgtcgccctcattattggcaatactgcgctatctaccttttctagtcgtttgatgaacgttaacgaattaaccgacatgccagtccgtgaaactaaaattgcgggcattcctctgaccgttcggctttatgcagatgactggacatggaacgatgtgtggtacgcatttttactgggcggcatgagtggaactgtcgttggcctgctctgctattacctgatgagcgtacgtatgcgccccggcagagaaatcatgaccgccatcaagcgcgaacaattttacgtggcgtatcaaccggtggtggatacacaagctttgcgagtaacgggcctggaagtactgctacgctggcggcatcctgtcgcgggagaaattcccccggatgccttcattaactttgccgaaagccaaaagatgattgtgccgctgactcagcacctgtttgagttaattgcccgcgatgccgcagaattagaaaaagtgctgccggtaggcgtcaaatttggtattaacattgcgccggaccatctgcacagcgaaagctttaaagcagatatccagaaactgctcacttccctgcccgcacaccatttccagattgtgctggaaattaccgagcgcgatatgttgaaagagcaagaagccacacaactcttcgcctggctgcacagcgtcggcgtagaaattgctattgatgacttcggcaccgggcacagcgcgcttatctatcttgagcgttttacgctcgattatctgaaaattgaccgtggatttatcaacgccatcggtacggaaacgatcacttcccccgtacttgacgcggtgctgacgctggcgaaacgcctcaatatgctgacggttgctgaaggggtcgaaacgccggaacaggcgcgatggctaagcgaacgcggcgttaatttcatgcaaggctactggattagccgcccgttaccgctggacgattttgttcgctggctaaagaaaccgtatacgccgcagtggtaaggtgtgcttacgtcccttattattcatagtgaaagcatgccggattgcggctaatgatgagtaaaaggaaatccgttgcagatgattgtgcgcatactgctgctgtttatcgctctgttcacctttggtgtgcaggcgcaggctatcaaggaaagctatgcctttgccgtgctgggcgaaccccggtacgcgtttaatttcaaccattttgattatgtgaaccccgccgcgccaaaaggtgggcagataacgttgagtgccctcggcaccttcgataatttcaaccgctatgcactgcgcggcaacccgggcgcacgcaccgagcagctgtacgacacgctatttacgacttccgatgacgaaccaggcagttattacccgctgattgctgaaagcgcacgctatgctgacgattattcctgggtggaggtcgctattaatccgcgcgcccgttttcatgatggtagccccattactgcccgcgatgtagagtttacttttcaaaaatttatgaccgaaggcgtgccgcaatttcgtctggtctacaaaggcaccaccgtcaaagccattgcaccgttaaccgtgcgcattgagttagctaaacccggtaaagaagatatgctgagtctgtttagcctgccggtatttccagaaaagtactggaaggatcacaaacttagcgacccgctcgccacgcctccgcttgccagtggtccgtaccgcgttacgtcctggaaaatggggcaaaatattgtctattcccgtgtgaaagattactgggcagcaaacttaccggtaaaccgtggacgctggaatttcgacaccattcgctacgattattacctcgatgataatgtcgcctttgaagcgtttaaagcaggtgcctttgatttgcgtatggaaaacgacgccaaaaactgggccacgcgttataccggtaaaaatttcgataaaaaatacatcatcaaagatgagcaaaagaacgaaagtgcccaggatacgcgttggctggcgtttaatatccaacgtccggtattcagcgatcgccgggtccgggaagctatcactctcgcctttgactttgaatggatgaacaaggcgttgttttacaatgcctggagtcgcacgaacagttattttcagaataccgaatacgcggccagaaattaccccgacgccgcggagctggtgcttctggcaccaatgaaaaaagatctaccgagtgaagtcttcacacaaatctaccagccgccggtatccaaaggcgatggctacgatcgtgacaacctgttaaaagccgacaaacttctcaacgaagcgggctgggtgctgaagggtcagcaacgcgttaatgccacaacgggtcagccactcagctttgaattattgcttcccgcaagcagcaatagtcagtgggtattgccgttccagcacagcctgcaacggctgggtatcaacatggacattcgcaaggtggataacagccaaatcactaaccgcatgcgcagtcgcgactatgacatgatgccgcgcgtatggcgggcgatgccgtggcccagttccgatttacagatttcctggagtagcgaatatatcaattccacttataatgcccccggcgtgcaaagcccggttatcgacagcctgatcaaccaaattattgccgcgcagggaaataaagaaaaattactgccgttggggcgagcactggatcgcgtattaacgtggaattattacatgctgccaatgtggtacatggcggaagaccgtctcgcctggtgggataaattctcccagccggccgtgcgccccatctatagcctcggtatcgatacctggtggtatgacgtcaataaagcggccaaactgccgtccgccagcaaacagggagagtaaatgggcgcttacctgattcgccgtctgttgctggtgatcccaacattatgggcgattatcaccatcaactttttcatcgtgcaaattgcgcctggcggtccggtcgaccaggccatcgccgccattgagtttggtaatgccggagtattacccggcgcaggcggtgaaggtgttcgtgccagccatgcgcaaacgggtgtcggcaatatcagcgacagtaattaccgtggcggacgcggattagatccagaagtgatcgctgagatcactcatcgctacggttttgataagccgatccacgaacgttacttcaaaatgctctgggactacatccgctttgattttggcgatagcctgtttcgcagcgccagcgtgctgacgctgattaaagacagtctgccggtttccatcaccctcggattgtggagcacgctgattatctatctggtgagcattccgttaggcattcgcaaagctgtttataatgggagccgctttgacgtctggagtagcgcatttatcatcatcggctacgccattccggcctttttgtttgccatcctgctgattgtcttcttcgcgggcggcagctatttcgacctgttccctctacgcggcctggtttccgctaactttgatagcctgccgtggtatcagaaaatcaccgattatctgtggcatatcacgctgccggtgctggcgacagtgattggtggctttgcggcgctgaccatgctgacaaaaaacagtttccttgatgaagtgcgcaagcaatacgtggtgaccgcgcgtgcgaaaggggtaagtgaaaaaaatattctctggaaacatgtgttccgcaacgccatgctgctggtgattgccggttttccggcgacgtttatcagcatgttttttaccggcagcctgctgattgaggtgatgtttagtctcaatggtctgggcttactgggctacgaagcgaccgtcagccgcgattatcctgtaatgtttggtaccttgtatattttcaccctgattggcctgctgctgaatattgtcagtgatatcagctatacgctggttgatccgcgtattgattttgagggacgttaatgagccgactcagccccgtcaatcaggcccgttgggcgcgttttcgtcataaccgtcgcggctactggagcttatggattttcctcgtcttgtttggtttgagtttgtgttctgaacttatcgccaacgataaaccgttgctggtgcgttatgacggcagttggtatttcccgttattgaaaaactacagcgaaagcgattttggcggcccgctggcaagtcaggctgattatcaggacccgtggctgaaacaacggctggaaaataacggctgggtactgtgggcaccgattcgctttggtgctaccagtatcaactttgctaccaataagcccttcccttctccaccctcccggcaaaactggctgggaacggatgccaacggcggcgatgtgctggcacgcattctctatggcacgcggatcagcgttctgtttggcctgatgctgactctctgttccagcgtgatgggcgtgctggcgggggcgctacaaggctattacggcggtaaagtcgatctctggggacaacgctttattgaagtatggagcgggatgccgacgctgtttttgattattttactttccagcgtcgtacagcctaacttctggtggctgctggcaattactgtcttgtttggctggatgagtctggtcggcgtggtgcgggcggagtttttacgtactcgtaatttcgactacattcgtgcggcacaggcgcttggcgtcagcgatcgcagtatcatcctgcgtcatatgttgcctaatgccatggtcgcgaccctcacctttttaccgtttattttatgtagtagcataaccaccctgaccagcctcgatttcctcggcttcggtctaccgctcggtagtccgagtctcggtgaactgctgttacaagggaaaaataaccttcaggccccgtggcttgggatcaccgccttcttgagcgtggcgatattattgtctttgctgatctttattggtgaagccgtccgcgacgcatttgatcctaataaggcggtgtaacatgacgcaaactctgttagcgattgaaaatttgagcgtgggttttcgccatcagcaaaccgtacgtacagtagtcaatgatgttagtctacagattgaggctggcgaaacgctggcgctggtgggtgagagtggtagtggcaaaagcgttaccgcgctgagtattttacgcctgctcccttccccgccggttgaatatctctccggcgatattcgttttcatggcgaaagcctgcttcacgccagcgatcaaacgttgcgcggtgtacgcggtaataagatcgccatgatttttcaggaaccgatggtgagcttaaatccattgcataccctggaaaaacagctttatgaagtgcttagtctccaccgcgggatgcgtcgggaagcggctcgtggcgaaattcttaactgccttgatcgcgttggtatccgccaggcggcaaaacggctgacagattatccgcatcagctctccggcggcgaacggcagcgggtgatgattgcgatggcgctgttaacgcgaccggaattattaattgccgatgaaccgaccaccgcactggacgtctctgtccaggcgcagattttacagctgttgcgcgaactgcaaggcgagctgaatatgggcatgctgtttattactcataacctcagcattgtcagaaaactggcccaccgcgtggcggtaatgcaaaacggtcgctgtgtcgagcaaaattacgccgctacgctatttgcaagtcccactcatccttacacacaaaagctactcaacagtgaaccgagtggcgatccagtgccgttgccagaacctgccagtacgttgctggatgttgaacagcttcaggttgccttccccattcgcaaagggattttgaagcgcattgtggatcataatgtggtggtgaaaaacatcagttttacgctacgagcgggtgaaacactgggtttagtgggcgagtccggttccgggaaaagtacgacgggactggcgctgctgcgactgattaattctcagggcagcatcatctttgacggtcagccactgcaaaatttaaatcgccgccagctgttacctattcgtcatcgcattcaggtggtatttcaggatccaaactccagcctcaacccacgactcaacgttttgcagattattgaggaaggcttacgggttcaccagccgacgctttctgccgcacaacgcgaacaacaagtgatagccgtgatgcatgaagtgggattagatcctgaaacacgccaccgttatccggcggagttctctggtggtcagcgacaacgtattgcgattgccagggcattaattcttaagcccagcctgatcatacttgatgaaccgacaagtagtctcgacaaaacggtacaggcgcaaatattgacgctattgaaaagtttgcaacaaaagcatcaactggcctatttgtttatcagccacgatttgcacgttgtccgcgcgttatgtcatcaggttatcatactgcgacaaggggaagtagtggaacaaggaccgtgcgcgcgcgtgtttgccacaccgcagcaggagtatacgcgtcagctactggcgttgagctgacgcttaaaaaggattgtagttactaaagggttcggcaattgccacaccaaaatttttcaatcggcatgttgcagcaaactcgtcctggcgatttacaaacaggcacggctcaccttcacactccagcacgctacatggaacttcgatgtcgcttaacgcctggcttagtttatacatcacgctccatgcattatcaccatccgggctaagcaatttaagcgccaccaggctgttgtcaccgcacggtccattttgcggaatcggttcaaccttgctacctgcgaaaccagcagaccagcgatagttctgcggcagtcgatggacgatactgagttgtaaactagtcacttattttccccggaagcacattcacttcacaatttgtttacatcaattttaacacatcatcaacaatccgtctttatacagatcgtaaagattgatgcctcgcctgcgtggcctctatggctctgatttaagtaatatctgcgggcgtggtcacgtttgcggggctatatgtacccgtttctgcgatctaactcaacctttttaactacaatgatgtgactttttacataaattgattttacataaaataaacatatatcgggggaatgatagatttgtggttgacatgcatcaacaaaggaagccttttagcttcctcgttgtgcaatagatcaccgttttttcggccgactggcgtacagacagaagagaatggagctggttgcgcagaatgcaatactccaaatcatcggccatgcagagttaaaggtcgcaagagaaagcaatgcgccaacaattgcccctatgccaaaacggaaggttcctgccaggctagatgccgttcccgccatatggggaaactcatcaagaatgaccgccatcgcattggaactcaccatgctcacgcagcccacaaacgccgcaacgccaaccaccaggctccaaaatcccagccccagcagcgcactgatgaccatccacgctgccataataaattgtatccacaacccgctgcggaacatatttaacgcgccaatgcggcggacgaagcggctgttaaagatggtcatcacgaacagaaaaacaatgtttagcgcaaagtaataaccaaagttttccggcgcgacgtggttaatttcaatataaacaaacggtccggcgcttaagaaactgaacatcccggcaaagctgaaaccactggcaagcatgtagctcaggacacgtttatggcggaacagcgccgcaaagttaccaatagtggtacgaatgtgaaatggctgacgacgctccggtggtaaggtttctttaatcaggaagaaaatcattgcgctagccagaatcgccgctaatgccaggatccagaagatgtaatgccagctcagccacaccagcacccagccgccaactatcggtgccatcagcggtgcaatggttgtcaccagcatgacaaagctcatcatccggctgaactcttctttcgggtaaatatcgcgcatcagggcgttaatgaccacgctggccgcagccgcagccagcccgtggaagaaacgcatcacaatcagctgatcgatggtgtttgccaacgcacacgccaccgcggcggcggcaaacaccagcgtaccgccgagcaccaccggcttacgcccgaagctgtctgccatcggcccgtagattaactgccccaacgcaaagcccagaatataagtactgagggtcatctgcgtactgcccgccggtacgccaaactgcgcactaattaccggtagcgcgggcagatacatatcaatgctcagcggcatcaacatggccagcaggccaaggataaaaacaatagcaaagctgctatgctgtcgggtggtcacaacgggctcctgaaagtcattgaaaagttagacgacgctggcaatttcttcttcagttaacggacgatattcaccgggggctaaatcagcatccagcgtaataccgccaatacgttcacgatgcagctcaaccacgtggttacccacggcggcgaacatgcgtttcacctgatgataacgcccttcgctgatggtcagacgaacctgcgttggggtaatcacttccagcaccgcaggcttagtgagatctttttcgttatgcagctgcacgcctttagcaaattgctctgccgtatcgtcagctacaggactttccagtgtcaccagataggtcttctcgcaatgatggcgcggagaagtaatgcggtggctccactgaccatcatcagtcatcagcaccagaccggtggtatcaatatccaaccgccccgccgcatgcagtttccacgctaccggttcatcaagaaaatagagcaccgttgggtgatcagggtcgtccgtggagcaaacatagccctgaggcttattgagcatgaagtaacgtggaccgtgttgctgcgccagcgggttgccatcgtaagcgacatcatgttcaggaagcagtttgaacgctgcattacggacgatttcgccatcgacggtgacacgattgccgcggatttcacgcccggcaatagcacggctaacgccgagttgctgtgcgataaatttatcaagtcgcatgtgtgtgattttgcctgtaaaaacggaggtcgggcattgacccgaaaatctgaactgttgtctgcccagtatagcggtctaataacatccctcaagggaaaaagatccatggcatactattagcagaataatctacctacgcgagaccatgatttttacacttcgcccatatcagcaagaagccgtggatgccacgctcaaccattttcgtcgtcataaaacccctgccgttatcgtgctgcccaccggcgcaggtaaaagcctggtgatagcggaactggcacggctggctcgtggtcgcgtgctggtgctggcacacgttaaagaactggtggcgcaaaaccatgcaaagtatcaggcgctggggctggaagccgatatttttgccgccgggctaaagcgcaaagagagccacggtaaagtggtatttggcagcgtgcagtctgtcgcccgtaatcttgatgcctttcagggtgaatttagcctgttgattgtcgatgaatgtcaccgtattggtgacgatgaagagagccagtatcagcaaatcctcactcacctgacaaaagtgaatccccacttacgcctgctggggctgactgccacgccttttcgattgggcaaaggctggatctaccagtttcattatcacggcatggtacgcggcgatgagaaagcccttttccgtgactgcatttatgagctgccgctgcgttatatgattaaacacggctatctgacgccgccagaacgactggatatgccagtagtgcaatacgatttcagccgcttgcaggcacagagtaacgggctgttcagcgaagccgatctcaaccgtgagctgaaaaaacaacaacgtattaccccgcacatcatcagccagattatggagtttgctgcaacgcgcaaaggggtgatgatttttgccgcgacggttgaacacgcaaaagagattgtgggattactgcctgccgaagatgcagcactgattactggcgacacccccggcgctgagcgcgatgtgttaattgaaaattttaaagcccagcgttttcgctatctggtcaacgtcgcggtactgaccaccggatttgacgccccgcacgtcgatcttatcgccattctgcgccctaccgaaagtgtgagtctttaccaacaaattgtcgggcgcggtctgcgtctcgctccgggcaagactgattgcttaattcttgattatgcgggtaatcctcacgatctctacgcgccggaagttggtacaccaaaaggcaaaagtgacaacgttccggtacaggttttctgccctgcctgcggttttgccaacaccttttgggggaaaacgaccgccgacgggacattgattgaacactttggtcgtcgctgtcagggatggtttgaagatgacgacggtcatcgcgaacaatgtgacttccgtttccgttttaaaaattgcccgcaatgtaacgcggaaaacgatattgccgcccgccgctgccgcgaatgtgacaccgtactggttgatccggacgatatgttaaaagcggcgctacgactgaaagacgcgctggtattacgctgtagcggcatgtctttgcaacatgggcacgacgagaaaggcgaatggttgaaaatcacctattacgatgaagacggcgcggatgtgagtgagcgtttccgtctgcaaacacctgcccagcgtaccgccttcgagcagctttttatccgcccgcatacgcgcacaccgggcatcccgctgcgctggatcaccgccgccgatatcctcgcccagcaagccttattgcgacacccggattttgtcgtcgcccgcatgaaaggccagtactggcaggtgcgtgaaaaagtgttcgattacgaaggtcgttttcgtctggcgcacgaattacgcggttaatggtagttttgattgatgtataaggcgattgagtatagaatctcgcccgcttttgcatacgcaaagcagatcacttacctgttgctgggtcgcctgtagcaggattaatttaagagagaaagaaatgtttactatcaacgcagaagtacgtaaagagcagggtaagggtgcgagccgccgcctgcgtgccgctaacaagttcccggcaatcatctacggtggcaaagaagcgccgctggctatcgagctggatcacgacaaagtcatgaacatgcaagctaaagctgaattctacagcgaagttctgaccatcgttgttgacggtaaagaaatcaaagttaaagctcaggacgtacagcgtcacccgtacaaaccgaagctgcagcacatcgacttcgttcgcgcttaattgctgaataagttgtaaaaaaccccgctccggcggggttttttgtatctgcagattatgcctgattacggtattgctattttttgcaggccagataaggcgttcacgccgcatctggcattcagaacacaaaaccgattaattgccgccagacgtccggcgctgcaattggtcgcgcaaattcggcggcgtgcctttaatggtcaaggtatcggttgctggatcccagaagatgcgttcacctaacagcatcgcatcaaagttaatagtcaagccaccgccgctaccggcaaacttcgtcaactgacgcagtgtgctacggtctgccgggaagctctcttccagttcgtagcctttttcagccgcaaactccgtgaagctcacttcgcttacgcctgccagctctttgctcaggcttttcagttcgatctcttcgcctgcctgcagctgctcattacagtagctataaacctgctggcgcacgttctgtcgctctgctttatccagttgtgcttcggcagtgaaatcatcaaccgcttgcaacagcccacggttttgcgctttcgcgtttaacccttcgctggccccgaggaaatccataaagaaatccgccactttgcgccctactcgccctttcaggaaagtgagatagcgggtggactctggattggtttcccattcggttaaatcgatacgcgcaacaatatccgcatgattgatatcaagataatgggttgggttgatgtcgagattttcgttaacgcgcatactgctcaggttgctcagaactgccaccagcaaatactccaccgccagatagcgatagtggcaaaacagcacgaatccaccgtcagcaaaaggatatttcgctaattcgtcacgcaggcggccggttgccgcgcggctaaatgccaggaagtcctcttcgccctgacgctgtaagcgcagcgtctgcgccagttcactctcttcgctaaacaagccgtaagctttatttttggcgctatagacccgatgcagttctgccaccatctcaacgacggtttctgtcggttccagcaaactatcgcgcaacaccagctcaaggttctgctcatcacgcttgataagctggtgcagagcaatctggttgatatccagactcatgataaactctcctttaagaccgggcggtattcaaccaccgccggttaagcgacgcaataaaagatggcggtcattttacagaaggcagcgtaacgagaatgatttaacgcataaaaaagcagaaaaaaaaccgttgctacggtaatatgttgccctttcatcaactaactgatttcgatttatgccacaaatttcccgctacagtgatgaacaggttgaacaattgctcgcagagctgctcaacgtactggaaaaacataaggctccgaccgacctttccctgatggtgttaggcaacatggtcactaaccttatcaacaccagcattgccccggcccaacgccaggcaattgccaactcttttgcccgcgccttacagtcctctatcaacgaagacaaagcgcactaagggaaacagataacaggttatggtaactcatcgtcagcgctaccgtgaaaaagtctcccagatggtcagttgggggcactggtttgcactgttcaatattctgcttagcctcgtcattggcagccgttacctgtttatcgccgactggccgacaacgcttgctggtcgcatttattcctacgtaagcattatcggccatttcagcttcctggtgttcgccacctacttgctgatcctcttcccgctgacctttatcgtcggctcccagaggctgatgaggtttttgtccgtcattctggcaacggcgggaatgacgctattactgatcgatagcgaagtctttactcgtttccatctccatcttaatcccatcgtctggcaactggttatcaacccagacgaaaatgagatggcgcgcgactggcagctgatgttcatcagcgtgccggttattttattgcttgaactggtgtttgcgacgtggagctggcaaaagctgcgcagcctgacgcgtcgtcgacgcttcgcgcgcccgctggccgcattcttatttatcgcctttatcgccagccatgtggtgtatatctgggccgatgccaacttctatcgcccgatcaccatgcagcgcgctaacctgccgcttagctacccgatgacggcgcgacgttttcttgagaagcatggtctgcttgatgcgcaggagtatcaacgccgtcttattgagcaaggtaatccagacgccgtttccgttcagtatccgttaagcgaactgcgctatcgcgatatgggcaccgggcagaatgtgctgttgattactgtcgatggcctgaactacagtcgcttcgagaagcagatgcctgcgctggcaggttttgctgagcaaaatattagcttcacgcgccatatgagctccggcaacactacagacaacggcatctttggcctgttctatggcatcagcccgagctatatggacggcattctgagcacccgtacgcctgcggcattaattactgcgcttaatcagcaaggctatcagctggggttattcagtagtgatggctttaccagcccgctgtatcgccaggcattgttgagtgatttcagcatgccgagcgtacgcacccaatccgacgagcagaccgccacgcagtggatcaactggctgggacgctacgcacaagaagataaccgctggttcagctgggtttctttcaatggtactaacattgacgacagcaatcagcaggcatttgcacggaaatatagccgggcggcaggcaatgtcgatgaccagatcaaccgcgtgctcaatgcactgcgtgattctggcaaactggacaatacggtggtgattatcactgccggtcggggtattccactgagcgaagaggaagaaacctttgactggtcccacggtcatctgcaggtgccattagtgattcactggccaggcacgccggcgcagcgtattaatgctctgactgatcataccgatctgatgacgacgctgatgcaacgcctgctacatgtcagcacacctgccagcgaatatagccaaggtcaggatttgttcaaccctcaacgccgtcattactgggttaccgcagcggataacgatacgctggcaattaccaccccgaaaaagacgctggtactgaacaataacggtaaataccgcacttacaacttacgtggtgaaagagtgaaagatgaaaaaccacagttaagtttgttattgcaagtgctgacagacgagaagcgttttatcgctaactgattaattataaatcagttagcgaaatatcttacttgcaatcggtgtggaaaacggtagtattagcagccacgagtcggcacgtagcgcagcctggtagcgcaccgtcatggggtgtcgggggtcggaggttcaaatcctctcgtgccgaccaaaaatcccaagaaaaaaccaacccttacggttggtttttttatatctgcaattaattcgataaacagaccgtgacacatcacagcctgtttattttctgttatcagaacgtcctgagctttcatcctatgaaattaattgctgttaaaagcattgggtacagaaaatacccatagctccatacccggagtcagtttttaaaaactgtttaaagaaatgcacaagtattgtgattgattttttagttgtttttcttgatgagaagctgatgcaaaattccgtctttataatgaaaatgatgccaaagcgaacgacaaggttgtagttttcactacatgtccatacataaaatggggtaacattcacgcgcctggtagcgttaccaacgctacgctcaaacataatgattctaataaaacctcaggagactactatgcctgaagcaacaccttttcaggtgatgattgtggatgatcatccacttatgcgacgcggtgttcgtcagttactggagcttgatcctggctctgaagtggtcgccgaagcgggcgacggcgcgagcgctatcgatctggcgaatagactggatatcgacgtgatcttgctggatctcaatatgaaaggtatgagtggcctggatactctcaatgccttgcgcagggatggcgttaccgcgcaaattattatcctgaccgtatccgatgcctccagcgatgtctttgcgctgatagacgcaggcgcagacggttatctgttgaaagacagcgacccggaagtattgctggaagcgattcgtgccggagcgaaaggcagcaaagtctttagcgaacgcgtcaatcagtacttacgtgaacgtgaaatgtttggcgcggaagaagatcccttcagcgtgctgacggagcgcgagctggatgttctgcacgagctggcacaggggctgagtaataaacagattgccagcgtgttgaatatttccgagcagacagtaaaagtacatattcgcaatctgctgcgtaaactcaatgtccgcagtcgcgtggcggccaccattctgttcctgcaacaacgcggggcacaataaaaatagcccgatagatttatcatcgggctgagatttatgacaaacgcaaaactgcctgatgcgctacgcttatcaggcctacgtggatcgatcaatttattgaatttacacaattttgtaggccggataaggcgttcacgccgcatccggcataaactaagcgcactttgtcaacagtctagcccgatggcatcaccatcgggcctctttttatttactctcctgcgggctcaaatgttgcatcgcctgcgcgatactacgttcaatcaccgcacggcgagtatcgttggcaggtaagagtttcaacatcatctcccacgcggcaacggcttcgccaaatcgctgctgctcaaaggcattaaacgcatacatgcttagcacacggatattgctatggtccgttctcaccagctgacgtagcagttcaccgccgaggcggttgtcgttgggatcagaactacgagtcaacgcttcagcgtatcccagtgcagcatcactgtttttcggatcgaggcgatacgcagtggcgtatgcatcggtggcgatactggcgttacccagcgccatgccaacgcggcccaacataatccagccttctatatctcccggatttttttgcagttgagtacgcatccccagcgcaagacggctcatctcttcttcgttgagcggatcggctttcggatccagcgccctgtccagcaacgccggagcctgtgccgtggcctgctgccagattttcacctgctgataattgccagtctggtagtagctgacgccagccacaattaacgccaccacaatacccggcagataaacaacatatccggcacgcttaccttccggcacgctttgttcaggaaacgcttccggcaccacgcgtacccgacgccggctgcgggcgtatatgacccaaccgccaatgccaatagccactactggcagcacccacagcagcacggtcagcggcgttaacggcggatcgtaagtgacgaagttgccgtaacgcgccaccatataatcgacaatctcttttttacttttaccttcctgcatcagttcatacactttctgacgcaggtcggtggcaatcatgctgttggaatcggcaatgctgttgttctggcatttcgggcagcgcagttcttcagtgagctgacggaactgttgttcctgtgcttcatctttaaactgcaacacatcgatggtcgccagcgcactgccggagatcatcagcatcagcacgcccaataaaaacctcattgtgcggcctccttactgtatttctcccacagcggcttgatctcttcttcccagacgcgaggattcagatcgcccgcatggcgatagcgaatgatgccgttgccgtcaataagaaacgtttctggcgcgccatagacaccgagatccagccctaacatgccatcgccatcaaacaggcttagcgcgtaaggattgcccagctctttcagccagctgattgccttctggcgatcgtctttatagttcatgccgaccacgcggatgccctgcgcagaaagctgattcagatattgatgttccgcacggcaggtcggacaccaggtcgcccagacgttaagcagtactggtttgccctgagtcagcacatccgcctgataaaactgccccggattgtccagactttcgagacgaaacttcggcacaggcttgccaatgagcgcgctttccagattggtcggatcatccccttcggcattacgcgccagctgccacagcagcgccgcggcaatcgccaggaagataatcaacggaattaacaatactttgcgcttcatacggcctccggcgcagttttttgcggactcacgcgcttacgatagcgaggatcaaacagacacagcagtccgcccaacgccatcatcagcccgcccgcccaaatccagcgaacaaatggtttgtagtaaagacgcacggcccacgcgccgttttccagctcttcaccgagggccgcgtacaggtcacgcgtgatgccgccgtcaattgccgcttcggtcatcatgctcccggcagtgttgtaataacgtttttccgcatacagcaccgtttccggcttgccatcgcgcgttacgccgatagtcgccacaccgccacgccagttcgggccagtcacctctttgacatcacggaaggtgaagcgatattcatgaatatcgacgctatcgccggacttcatgcgcacatcacgctcaacgctatagttctggctaaaggcaatgccaacaattgtcactgccagcccaaggtgagccgccaccatcccccaataactgaaggtggttttcgtgccgcgactaatacgtagcgcagcttccgcaattgccagcaccgcaatccagcaggccattgccaggccgagcaccgtcatcgccacaactttgctttcgaacagccacggcaacagcaggctcagcaccagcgtagagatgaaggcgataatcaataaattgcggatcttacgcgggcgatcccgcccccagcgcaccagaggaccgacaccaagcagtagcgcaaacggcaccatcagccaggtaaacatggtgttgaagaacggttcgccaatgctaatactgcccagtcccagttgcttatgcaccaacggcagcagcgtccccagcaacaccaccagcatcgcagcgaccagcaaaacattgttcgctaacagcaaagattcccggctccacagcgcattgtttacgcgactgcgaactttgtgtccacgcgcggcaaacagcagcaggctaccgccaatcaccagcaccataaaggcgaggataaacataccgcgcgccggatcagacgcaaacgcgtgtacgcttaccagcacgccggaacgcacgaggaaagtccccaacagacacaagctgaaggcactgattgccagcagtaatgtccacgctttgaagctggcgcgttgttcagtgaccgccagactgtgcatcagcgcagtccccaccagccacggcataaagctggcgttttctaccggatcccagaaccaccagccaccccagccgagttcgtaataggcccatgcggaaccgagcacgatgccgagcgtcaggaagatccacgctgccagcgtccacggacgagtaaaacgcgcataagtgctgtccagacgcccgctcagcaaagaagcaatggcaaaagcaaacgccacgctgaaacccacgtaccccatataaagcagaggcggatggaagatcagccccggatcctgcaatagcgggttaagatcgcgaccttcaatcgggaagttcggcaacgtgcgagagaacgggttagaggtaaagagaatgaacagcaaaaagccgacactgaccatccccattatcgccagtacacgggccacaatatccagcggaatacgctgactaaaaatcgccaccgcaaaggtccagccgctcatcagcagcacccacagcagtaggctgccttcatgcgcgccccaggtagccgccacgcgataccacaccggaagctgggtattggagttgctggcaacataggtgacggtgaagtcgttgaccacgaaagcattgaccagcaccagaaatgcgccagccacagacataaacagcagccaggcaaacaagcgggaagacgccatcatgcgcgcatctccgcgcgccacgccccatagcggatacacggacagcagcagcgcaattcccagcgccaggcacagcagtccgttaccaatttctggcatcatgatgctgggtccttataaacttacgtcaacttgctgggtccttataaacactcgccgggcgacggtggttagcttccatcgctttctcaacttctggcggcgtatagttttcatcgtgtttcgccagcacttctttcgcgaggatatgattgcctttttccagttcgccctgcaccacaacgccctgcccttcacggaacagatccggcaaaatgccttcgtaagagacatccacactgccttcagcatcgtaaatggtgaaggtcactttcaggctattgggatcgcgctgcacactacccggcatcaccatcccgccaacgcgcagacgctgaccgacttccggcatttgctgagtttcacgcttgccgtagagaatttcccccggcgtataaaagagatcgatattgctgcgcagcgcatatagcaccagaccgatagtcagcgccagccctgccaacacggcacaggcaatccacaagcggtttttacggcgaatattcatgcagcctcctgctgttgcgcagcacgtaaacgcgcctcacgcgcccgctgttgcgccacgccacgcagaattgcgcgatgttgcatcacgctgtgcacgaccaaaaccaccagcggaataacggtcatcaccaccgccagccagacaaaaaaggcgtaaccgcccattgcgaaaaattcattccaggaagcaaatgcaggggtcatttacggcctcttttcagtatcagttcactcacccacggacggcgtttttccatcagcaaaatcaaattacgcatccgcatcagcgtcagcgtggcagacaggagcaggaagccaaaaatgctccagcgcagcgggctacgcatcgccggatcgatactttgctgcatccgcgtacttccctgatgcagggtgttccaccactccacggagtaatgaataatcggcagattcaccacgccaatcagcaccaggatacctgccgcacggcccgccagacggcggtcgtcgaaggcgtgccacagggcaatcacacccacatacaaaaacagcagcaccagttcagaagtcagacgtgcatcccatacccaccaggtgccccacatcggttttccccatgcagagccggtaaccagggcaataaaggtaaacacggcaccaatgggggccatcgccgccaccgccaggttggccattttcatctgccagacaaggccaataaacgctgccactgccatacttgcataaatgcccatgctccagatcgccgcaggcacatgcaggtagataatgcggtagctatttccctgctgataatcagccggagcaaagccgaatccccagatccagccgacggtaagcacgaccacactggcaattgccagccacggtataaaccagccacagatttgatacagccgtggtgggatcgccagttgatgcagtgttttccacatagtttcgataccagactcgaacaaaaatcagtaatccagcgttattgaatgctgattcgtaacgctgccgccgtcgcaaaaggacttaatgtcgcggtgcctgccagcaacgcgcctaaaattgccagatacccgtcaacgggcaaatgcatagaagccgcgtccatcgcggcggtggcaaagatgagtaatgggatagtcagcggtaacaccagtatgctgagcagcacaccaccgcgcttaagtcccactgtcagcgccacgcccggtgcaccgagaaagccaagcgtaggcgttcccagcagcagcgtcagcgccatcacttgccagccataaacatccattcccagtagcattgctaccagtgggctaaggatgagtaacggcagaccggttaccatccagtgcgccatcaccttcgccagcacaacggcgggcaagggtaacggcaacaacatcaattgttcaagactgccgtcctgcaaatcgtcacggaacagtcgttccagcgccagcaaggaactaagcagcgcagcaacccagataatgcccggtgcaatacgcgccagcagttgcggctccggaccgatactgagcggaaaaagggtaattacaatcaggaagaaccacagcgggttggcgatttcggcgctatggcgaaacgctacacgcagctcaagacggaaaatgcgccagaacatcatgcggccctcgtttgcgtcagactaatgcggcgaattttactttcagcaacgttgagcggctggtgggtagtcagaatcacaatccccccctgctccgtatgctgcgccatacgctgggtcagacgatcgacaccgttaacgtcaatcgcggtaaaaggctcgtcgaggatccataacgtggcacgggtcagccacagacgcgctaaagcgacgcggcgttgttgcccggcgctgagctgatttacaggaatatcttcgaatccggcaagcccggcctgcgccagggcttccagacattgtgcggtatcgccatcgcgatgataaaagtgcagattttctaacgccgtcagccgggttttgatccccggctgatggcctatccataacaggttttgatggtagctgtcgcgtacctgatgcaagggctgcccttgccagagaacctcgcctgcgtcagggcgagacaaccccgtcagcaaacggagaagcgttgtcttccccgcgccgttgctaccggtgatttgtacccactctcctgcgttcagcgtaaaactcaagccactaaataaggttcgttcatcccgctcacaaagtaactctctggcttcaagcatacccacgcaataaccctgttaaaaacctggctcgacttcacgcatatcgggcagcttgtgcgctatccctttatggcaatcaatacaggtttgcccatctttcaccgcctggtcatgcatcttcgcggcaacgcttttctgggcggttgtatccatatactcgaagttgtgacagttacggcactcctggctgttattgtccttcatgcgccgccactcattctgtgccatcgtcagacgatgagcttcaaatttctgcggcgtgtcaataacgccaaaaattttaccatacagctctttacttgctttgagcttgcgtatcatcttcggcacaaactcgtgcggaacgtgacaatccggacaggtcgcacggacgccgctacggttgttgtagtgcacggaatccatgtattcctgatacaccgtgttgcgcatttcgtggcagctaatgcagaactcttcggtattggctttttccatcccggtgttaaagccaccccagaagacgatgccgccaacaaaaccgatcaacagcagcgtccccagcgccagacggctgggggtacgccaccatttccacaggcgcttaatcagaccaggcttacggtcagaatttcccataataacctcttatttcccgtaacctttacttggggtaaaggtattccccacgattggcgcggtatcggcctgcggtacgtgacattgcagacagaaataacgacgcggagccacttccgcgcccactttgccgtcgctgtccataaagtgagtaggactgatacgcggcgcgccagtggtgcgatagctttcgacaccgtggcactgcaagcagcgattggtattggtcgttacctgataaccttcaacgctatgcgggatcattggcggctgattcacatagttcagcggcatccgatcctgctcttttggcatccgaatggccccttcctgtgtcccggatacttccgggctctggctaaaatcgacgccattagccgcccaaaccgcgccgcttaccaccagggccagcatcgccgtccattgacacagcgctttcttcaggtcatggcttttcatgatttcgctcccgaactccattatgtcaacttttcgctccgctactccatcgtgtagttattgtaaatacatcctcagaacagacatccacgcagcgaccgcacgtcatgcaatcgcggctggtgacctgcaccgggctttgttcatccagcaccggggcacgtagcacatgcggttccgggcaaacatgaaaacaatccatacagcggttacatttctgccgatcggtggccgcaacggtaatcacacctttgctacccagcacgccatacagcgcgccaaccggacaaatgtgcccgcaccagccgtgttcaacgaccagtagatcaaataaaaacagcgcgagaataagcagcgcgccgctgccgaagcccattaccaggctacgccccatcagagaaacggggttgatccattcccaaatgagcgtgccagttaaggcacttcccaccagaatgaccaccaacagcacgtagcgaatgtggcgagggatcgtcgcagactgattgaggtcaaagcgcctgcgtaaccagttcgctaagtcggtaatcgggttcagcgggcagacccagctgcaaaataatcgctttcccgccagggcgtagagcacggtgataatcaccgcaccggtcaacgccaccgtggcaggcagatgaccactggcaagactttgcagcgtcatcagcggatcggtcagcggaacggtgtcgaataacaggctactgctgtagttgccgtgcaagatccacacaccaaaccatggaccgctcaaaaacatccccagcacgaagaactgacaaaggcgacgtaacaccagccaacggtgactgcgccaccagccttttttctccagcgcctcgcgcccggcgtcacgtttacgatttgccattgttcccctccagccagccgttacttagcttttgccattgttcccctccagccagccgaagcggtaatggtgacctaactcccctttcgccagactcagcggtaacaccttgattgccggttgttccagcacgcatactttttcgcacttaccgcaaccggtacaggcgtcgctgtgaaccgtcggcagaaagcgggcgtgcttaccggtacgcgtgttgcgctccagctccagggtgatggcctcatcaattttcgggcattcgcgataacaaacatcgcagcgcagcccctgaaagttgagacagttttcctggtccaccagtaccgccagccccatccgcgcgtcgtcgatgctttcaatctcacgatccagcgcaccgcttgggcacactttggcgcacggaatgtcctcacacatttcgcaaggaatatcccgtgcgacaaaatatggcgtgcccgcgctcagaccagaggccagcgtcgccagttttaaggtgtcgtaagggcaagcctgaacacactgaccgcaacgcacacaggcactggcaaaggcgttctcgtttatggctccgggcgggcgcaaccgcacgccagatgcgcgtgcggtttgctgttgtaaccccagcgccacacccacggcagccagcccgcctgctgtgcgaacgacatcgcgcagaaagcggcggcgaccattttgaggtttcgcactccgggacataatggcttacaccttctccagtttgaccgcgcacttcttgaagtccgtctctttgctgagcggatcggtcgcatccagcgtcagtttgttaaccaactgtgcggcgtcgaagaacggcatgtacaccaggccctgtggcggacggttacgaccgcgcgtttcaacaatgctgatcacttcgccacggcgagaaaccactttcactttgtcgccacggcgcagatcgcgcgctttcgcatccagcgggtgaataaacaggaccgcttccgggaaggcgcggtgcagttctggtacacggcgagtcatactgccggtgtgccagtgctccagaacgcgtccggtagagagccacaggtcgtactcttcatccggtgcttccgccgccggttcgaatggcagtgcgaagatcaccgctttgccatccggtttaccgtagaacttatagccttcgcccgctttcacgtacgggtcgttaccttcgctgtaacgccactgcgtttctttaccgttcaccaccggccagcgcagaccgcgcgctttgtggtagtcatcgaacggtgccagatcgtgaccgtgaccgcgaccaaaccatgcgtactcttcgaacagccctttttgcagatagaagcccagctcgcgggattcatcgttcagctgatcttccgccagttcggataccgggaatttgctcacttccggtgtggcatacagcacttcgtacagcgttttgccacgcagttccggtttcttcgccagcagatcttccggccatacttcttcagttttgaagcggcgggagaactggactaactgccagagatcgcttttcgcttcgcccggtgcctgtacctgttgacgccagaactgagtacggcgttcggcgttaccgtaagcgccctctttctctacccacattgcggtcggcaggatcaagtcggcggccagcgcactgactgtcggatacggatcggagacgatgatgaagttgcgcggatcgcgccagcccggcatacgctcttcattgatgttcggcccggcctgcatgttgttggtacacatggtccagtaaacattcagtttgccgtctttcagcgcacggtcttgtgccaccgcgtgcagaccgattttcgccggaatggtgccgctcgggatattccacttcttctcgcagatatcacggtgtttctcgttggtcaccaccatgtccgcaggcagacggtgagcaaaggtgcccacttcacgcgcagtaccacacgcagaaggttgcccggtcagggagaacggaccgcaacccggctgggaaattttgccggtcagcaggtgcaggttgtagaccaggttgttagcccacacgccacgagtatgctggttgaagcccatcgtccagtaggagatgactttcttgttcggatcggcatacagctgcgccagttgttctaactggtctttcggcacgccggtcatttcggcagttttttccagcgtatactcggcaacgaaggctttgtaatcttcaaagctcatcggttcggaggcgtcagaacccggattcttcgctgctttttccagcggatgggtcggacgtaaaccgtagccgatgtccgtcgcccctttgcgcaggttaacgtgcttgctgaagaagtcctgatttatcgcattgttttgaatgatatagttggcgatgtagttcaggatcaccaggtcagattgcggcgtaaagatgatgccgttgtccgccagctcgaagctacgatgctggtaggtagaaagcaccgccacggtgacgttctggttagagagacgacggttagtgatgcggctccagaggatcgggtgcatttccgccatgtttgcgccccacagcacaaacgcgtcagcctgctcgatgtcgtcatagcagcccatcggctcatccataccaaaggtacgcataaagccaactactgcgctcgccatacagtgacgcgcgttcgggtcgatgttgttgctacggaagcccgctttaaacagcttggacgcggcataaccttcccagatagtccactgaccagaaccgaacataccgatgctttccggccctttttctttcagggcggttttgaatttctcttccatcacatcgaaggcctgatcccaggtgattggggtaaattcgccttctttgtcatatttaccgtttttcatacgcagcagcggctgcgtcaaacggtctttaccgtacatgattttgggcaggaaatagcccttaatgcagttcaggccacggttaaccggtgcgtccgggtcgccctgacaggccaccacacgtccctgctgcgttccgaccagaacgccgcaaccagtaccgcagaaacggcacggcgctttatcccatttgatggcttcctgctgaccaacaacggcgcgggcaacgcccggcacgctgagaccggcagccgccgcagcggccgcaacggcgttagctttcataaagctacgacgactgagtttcatggtgtttcctcaccttgctcttcctgctggtgataaaccaggctcaccgccagcacgccctctacgttgcgtacactctcaatggtttggatcagcgtttcgctgtcttctgcttccaccaccacaatcaactgaccgctcggcgcgtcgctgacagcaacttcacagccgggaaaggcgttcagttgggtgctgatgtcactaattcgttcgcttttggcctgcacgaccaggctgcaaacttgccagttagtgtgcatggagatactccgcagttatggcacttaccggacagctggctgcacatgctccacatccgttgcaaagttggctattaagttgcggctggtagatcccggagagcgtcgggcgaaagataattgccattggctcacagctatcctgacagcggcggcattcaacactctgatacgccaggcacgcgtccccgatggtgaactgcaaatcccaggccctggtgtggcgcggagaaaataggctttcggggcaagcctgcgcgcaggcgtaacagaagctgcactcgttatttttgaaattaacgctcggatagccgcccgcgccgcgttgcagaatgttgttttcacaagcattaatacaggcgtcgcagcgggtgcaatgggtcagaaaatgagattcatcaccggaccagggcggacggataccgttactggctttgcgccagcgaccagtgagtatgccccgacgggatgcatcaatcttcacattgaccttccatcattaacgcgctctgaaaattgagagcgaccaaataaaccgcataattaataagccatttttatagccgctaagatattaaaggatgtgtcaaagatgcataccccgatcggggtaaaacctgtagcaggatcaaaagagtggcgggaagcgtggcaaaaacgggcttttgctcacatttcaaatggttataaatatatttatatagcgattgattcaccagagatatttctgctggtttgctctctcattagaatttaacactaaaagagcaggtaaaattgtctgaatgttctttaagttattcataaagcaaattaataaatctgatgaatatgttaaccttcagcgacatcatcggtgaaaacctataaatgaagaaggaaagcaaaaaaatgaagaccattctacctgcagtattgtttgccgctttcgctaccacttccgcctgggcggcagaaagcgtccagccactggaaaaaatcgcgccttatccacaagctgaaaaagggatgaagcgtcaggtgattcagttaaccccgcaagaagatgaatctaccctgaaagtagaactgttaatcggtcagacgctggaagtcgattgcaatttgcatcgtctcggcgggaagctggaaaacaaaacgctggaaggctggggctatgattattatgtctttgataaagtcagttccccggttagtacgatgatggcctgcccggatggcaagaaagagaagaaatttgtcaccgcgtatctgggcgatgctggaatgctgcgttacaacagcaagctgccgatcgtggtgtatacgccagacaatgtagatgtgaagtaccgcgtctggaaggcggaagagaaaattgacaacgcggtagttcgctaaactgccgtgaagtgcggcaccccgtaggtcagacaaggcggtcacgccgcatccgacatccaacgcccgagccggttgcctgatgcgacgctggcgcgtcttatcaggcctacaccgctgtgaagtgcggcaccccgtaggtcagacaaggcggtcacgccgcatccgacatccaacgcccgagccggttgcctgatgcgacgctggcgcgtcttatcaggcctacaccgctgtgaagtgctccaccccgtaggtcggataaggcggttacgccgcatccgacatctaacgcccaagccggttgcctgatgcgacgctggcgcgtcttatcaggcctacaccgctgtgaagtgctccaccccgtaggttggataaggcggttacgccgcatccgacatccaacgtccgagccggttgcctgatgcgacgctggcgcgtcttatcaggcctacaccgctgtgaagtgctccaccccgtaggtcggataaggcggttacgccgcatccgacatctaacgcccaagccggttgcctgatgcgacgctggcgcgtcttatcaggcctacaccgctgtgaagtgctccaccccgtaggttggataaggcggttacgccgcatccaacatctaacgcccgagccggttgcctgatgcgacgctggcgcgtcttatcagcatacgccacatccggcataccatgccggatgtggcgtatcattacaacgcaatatccgccacttctttttgaacgggttgcggtttcaactgcggtttcggcgtactatctgctgcctgcggcttgtcgtagttcaaccccagcacttcgctggtgtactgcaactcgcgttctgttgccgctacatcaccgttcagcttgcgtccataagacggaacgatcgctttcaacgtagcctgccattgcgggctggaaacacgatcgccaaatactttttccagcagattcaacataatcggcgcggcggtactcgcccctgggcttgcccccaggagcgcggcaatggttccttgctggtcactgacgacttcagtacccagacgcagtacgccacctttctcggcatcacgcttgataatctgcacgcgctgccccgcttgccacaaacgccagtcctcttttttcgcctgcggatagtactctttcaacgcttcaaaacgatcctcttcactcaacatcacctgactcaccagatatttcaccagatcgaaattatccagcccgacgtgcatcatcggcatcacgttagaggtggtggtggaactcattagatcccacaaactaccgtttttgaggaatttggtactgaaggtggcaaatggcccaaacagcactacgcgtttaccgtccagaacgcgggtatcgatatgcggaacgctcatcggtggtgcgccaacggatgctttaccgtaaaccttcgccagatggtgattaaccacgtccgggttttcgctaacaaggaactgtccgcccaccgggaaaccggcgtagtctttcgcttccggaatcccgctttcctgtaacagcttcagcgccgcaccgcccgcgccgataaagacaaatttggcacgaatgttctgtgcagtgccatttttcagatcggcaacggtaacggtccaggtgttatcgtcattacgctttagggcgcggacttcgctgctgagttgcaggctgaagttagatttcttctgcaaggaagcaattaactggcgggtgatctcgccgtagttcacatcggtaccaatttccgtacgcgtggctgccactttctgttgcggatcgcgcccttccatcactaacggtgcccactctttgatctgcgcgtgatcttcagagtaacgcataccgcgaaacaggctgctttgttgcaacgcggcgtaacgggcgcgcaggaaattgacgttatcctcgccccagacaaagctcatatgcggaacggtattgataaaactacgcggagtacgcagcacgccgcgctcaacctggtgcgcccagaactggcgggaaatctgaaatgcttcgttaatggcgactgctttttcaatactgatgctgccatcggcgttttgcggggtgtagttcagttccatcagtgcagaatgcccggttccggcgttattccagccgttgctactctcctgcgcgacaccctccaggcgctccaccatggtcatgctccattcaggctccagctcgcgtaaataggtccccaacgtggcgctcataatgccgccgccaatcaacagtacatcagtttcctgctcctcggacgctttcgcttttgccgccatgctaacggcattaagccccacggccatgctgaagagcatggcagtcacttttttcatcttgttaatgccttacttttagtcgctttattgcaggtgagatttgcgcggcatcaacggtaacacttaagtaacaacatttaaataatgtttataaattatattctaattttagaaacattataatttcgttgattaattatagggttattagaaatgaagggatttttagcatattgacctgacggcagcagtccgccaggtcagcgtcgtaatattatgccgtccgggcaacggcatcacggctagcggcatcgcgctcttcgcccgtcagctcgctaagttgcccattgcgcatttccagcaggcggtcggcgtggataaagtaatgatcatcatgactgatagcgaaaatagttttacccatctcctgcatcagcggcagcaacacctgataaaactcacgacggaagtgtggatcctgatccgccgcccattcatccagcaggataatatcgcgttcttctgccagcgccagcaacagcgccacgcgttttttctgccctttacttaacttcaggttaacaatacgcccgttgcttaactcaagcttatgagccattttcagctgcgccagccacttctcaaccagttgcgggttagcgggtttaccctccggccccagcagttgatcaaacagccagacatcggtaaacactgcgctaaacagtttgcgataatcttccggttgttcgccgctgacaggtttgccatccagcaagatttcgccgctttgtggctgatacaagcccgtcaacaacatcgccagcgtgctttttccgctaccgttgccgccaatcagaaacagcagctcgccacgtttgatggtgagattaatcggaccaacggaaaacgcgttatcctgataagcaaacgtcacgttacgcagctccagcgtttgccagttgggaaacgcctgcgggcgcggaaactctgctttgaaaggcgcgagcgcgaatttgttcagcttgttaaacgccacctgcgccgtcagcagcgtcggcaatgcgccaaccgcgctaagcagcggcgtacgcaggaataaaagcgtcaagctataggtcgcggcaacgttggtatcagcccaaccgaggctgttcgccatccagaacaccaggccgattgcgcccagcatcatgatgttactccagttcacggcactaagatggaaggtgtctgcgcgaataatatggtggcgatactcttgcgcatcaggaatgtagaggttgttaaacacatactcggcgcgttcccggttcagagtcagctctttgcgcccttcaagtacagtttgaaaatccgtgtacagcttgtcttcggtttcacgcagggtcgccatatgtttgtacacccgcgccaccagcacaaaaccgccccagatggtgatcgccatccagatagccgttaccagcaacattttgccgctcagcatccacagatacgccgcactaccgatagtgagaatgatcccctgcaccagttccggcagacgcacaaaagcaatggtgatattgcgcacatcgctggttaaccccgccagcaagctggcgctaccgagttgttcaatgcgctcgacgtgagtatccagaatccgcttgataaattcactacgcagtcggtaaacgaagtgatgccccaaagtggtgagcgccagttggcttccgagagtgactgccatcaacagcagcaataatcccagaaactccggcaacaccagcagactggtatccgccgtttcgataaggcgctgattgataaaagcaattaagccaatgcctaatgccgcactggcgaggcttagcgccatcacactgataaatggccagcgatactgccgccagacaagtacaagaagttccatgcagaaaacccggacaatgaattacagcccgcagtttaaacatcttcgcgcgcacagcaataataattcttatttttattcttttttacctgcctgacggaatgtcaggttgtagcggcagtcgatggtgagtggatgaaaccccgctttcaacggttgaataccgtgataaaacagccggctttcaccgccccataccaccacatcgccatgttccaacaacaaacgtttgagcggatcatttcgtttcaggccgccaaattgaaaaatcgcgggtaagcccagagaaacagaaacaattggcgcgcgcagatccggttcgtctttatcctgatgcaggctcagtttcgcgccaggagcgtagcggttgataagacaagcatctggctggaaatctggatagcccgccgccgtagccgcacgttgacataaattatgaaaactctgtggcatggcgggccacggtttatttgtttgcggatcaatggggctatagagataaccttgccgatgggtcgtccagcccagatgcccacagttggtcatcgccacgctcatggtatatcccccgggggtgaccatctggcgaaacgggctctggctggcaacgtcattaatatcgcggatcagttgctccgcagcgttaaaagcaaaacgccgtaaaattaccgcaccagccgccagtggctcttgccacggttcagcatcggcaaacagatccaacattacctctcctcattttcagcttcgcggcgcagcagttgcgctttacggctcacgccccagcggtaaccggaaagtgtgccatcaccacggaccacccgatgacagggtattatgatagccagcttgttggcggcacaggcgctggcaacggcccgtaccgctttcggtttgccgatggcgttagccagttgctgataactgacggtttcaccgcaaggtatcgtgcgcagtgcctgccagacttgttgctgaaaagcagtgccgcgaatgtccagcggtaacgtcagcggcgtatcgcgttgattgaggctggcgatcacttcacgcacatgttgctgaaacatcagatcggcaggcgcgttgtcggcagcgggaaacatctgctgcaactcgctgattagtgtcgcgtcatcatcgcccagcaatatcgcgcaaatcccccgctcgctttctgccaccaggcaacgacccagctcacaatcagccagcgcgtaacgcaccgccagattttcgccaccgtgacggaattgtttagccgtcatgcccagcgtttcgtcagctttgcgatagtaactgctgctgtcggggaatccggcgttaagaatagacgtcgtcacgctctcccctttcgccaggctttcgcgcaaacggcgagcgcgccaggcctgttgccaggctttaggcgtcattccggtagtcgctttaaacaaccgatgtagatgaaatggactcatcgccacctggtcggctaaggcttccagcgttacaggcgtttcctgttccagcagtcgacacgcgtgggtgattttatccaaccgatgttgctgggcattggctttttctggctgacaacgtttgcaggggcgaaagccagcggcgagtgcctcgctggcatttgcgtagaaggagacgttttcccgcaaagcatgtctggcgcggcaagacggacggcaaaagatgcctgtggtacgcacggcgaaaacgaattcgccgtcggcattcgggtcgcgggctaagacagattgccagcgttgatcgtcagttaagcatgtggcttttttcataatcagctccctggttaaggatagcctttaggctgcccggtcaccatcacgcaaaaaccaacaatcttgcgctttaatttttttcgctgacaaggaagcttttaaactgtggactcatccaggttttaaagctatcgccttctttggtgatcatataaaccgccagcccttcccggcgaacaacctctttagctttctccggcccgagtaccatcaagccagtatcccaggcatcggcttccagcgccgtcggagcaatcaccgtcacggataccagattgtgttcgatgggacgcccggtttgcggatcgataacatgggaaagacgtttgccgtccagttcgtaatagttacggtagctgccagaggtgctaatcccatgaccgttgatatccaccacagcctgaaccgcgttttctttatcggttggtttttgaatcgctacccgccacggcaggccttcaccgttcataccacggctgttcagcgcgccgcccacgctcaccagatagcgggaaatcccttcctgctccatcaagcgtgccaaatgatcggccgcatagccttcgccgacggtggagagatcgacatataaatccggcaggtctttttgcagatattgctgatggctctgattgatgaccgtcaggtgctgtaagccggttttggctttcatcgcatcgatctgttcctggctcggaatttgaaccggctgttgttccgggccaaagccccacagattcaccagcggcccgacggttatatccatcgcgccatcggtcttcgcgccaatgcgcaggctggtggtgacgatatcggccatcgcttcacttaccggccacgggcttaaactttggctgtcgttaaagcgcatcagcgcggaatcttttttataggtgctaagcagctgatcgtcggcgtccagttgggtctgaatcttttctttaagttcggcgctgcgtttggcgtcaatgcccgggatgctggcacgccagaaggtacccatagttttgccttcaagaacggtaacttcagtagcgtgggttttggcgggttgtggtttttgatcgcaaccaacaaagaagagcgcggcagccagcagtgccacgcgggtaaagcttatttccatacgtgattatcctcatgcgaacggtcgcaagagtacaccaaaaaactgagtttgtacgctgaaaacaatgaaaaaagggcccgcaggccctttgttcgatatcaatcgagattagaactggtaaaccagacccagagctacgatgttatcagtgttgatgccagcgtcacgagtgaactggttgtcgtccagcaggttgattttgtagtcaacgtaggtggacatgtttttgttgaagtagtaggtagcaccaacatcaacatatttcaggatatcttcgtcgtcgtagccacgacccaggtttttacctttagactgcaggtaagccagggacggacgcagaccgaagtcgaactggtactgagcaacagcttcgaagttctgtgctttgttcgcccaacccagggaacctacgcgagttgcgttgtaggtctgggtgtactgagcagccaggtagatgttgttagcgtcgtatttcagaccaccagtgtaggtttcagcacggtcgccgttaccgatgtaagcagcggtgttctgagcatcagtacgtttggagctggagatcgcaccaccgataccgaaaccttcgtaatcataagtgatagaaccgccgacgccgtcgccgttttgacgcagtgcgtcacgaccgttgttagttacgccactagtaaagccttcaccagatgggttgccgtttttaccctggtactgaacagcaaagttcaggccgtcaaccagaccgaagaagtcagtgttacggtaggtcgcgaagccgttaccacgctgctgcatgaagttgtcagaaccgtaggtgtcaccaccgaattctggcagtacgtcggtccaggaagttacgtcataaacaacgccgtagttacgaccgtagtcgaaagaacccacatcctggaatttcagacctgcgaatgccacacgggtccaggagttgttttcgttttcagcgctgttgccctggatctgatattcccactggccgtaaccggtcagctggtcagtaacctgagtttcacctttgaagccaagacgcatgtaggtctggtcgccatctacatctttgttgtcagagaaatagtgcaggccgtctactttaccgtacagatctaatttgttgccgtctttgttgtaaacttcagcagcgtttgctgcgcctgctaccagcagagctgggaccaggagggacagtactttaactttcatgttattaaccctctgttatatgcctttatttgcttttttatgccactgcatactgattaaccctcattaatcagtcggcaagtccattctccccaaaaatgcagaataatccaacacgaatatgatactaaaacttttaagatgtttcatttatcgctatagatgtttcaaaatgtaaatgcaagggaactttttaagattattgcggaatggcgaaataagcacctaacatcaagcaataataattcaaggttaaaatcaataacttattcttaagtatttgacagcactgaatgtcaaaacaaaaccttcactcgcaactagaataactcccgctatcatcattaactttatttattaccgtcattcatttctgaatgtctgtttacccctatttcaaccggatgcctcgcattcggttttttttacccttctttacacacttttcattattctgtgctaccacagaaaaactataacgcttgttaactatttcacaaataattaacatccgcataatttccagcaatctttgtttatttgcaattatttttgttgggctttttgtaggttatttgtacagcaaaatggcgcttgtacatctatttcccccaatgcaggatgataaatatcacgggagaatagagaatcatcaatcaggtaagagtctggaatttcacactgtaccctttatactgccctatcacttcgcgaagttttaacaggtcataaacacgaatgcgtcagaaagagacaacggccacgacccgctttagtctcctaccggggagcattacccgcttctttttactgttgatcattgtgttactggtgacgatgggtgtaatggtacaaagcgccgttaacgcctggctgaaagataaaagttaccagattgtcgacattacccatgctatccaaaagcgcgtcgataactggcgttacgtgacctggcagatctacgacaacattgccgcgacgacctccccctcctccggcgaaggtttacaagagacgcgcctgaaacaggatgtctactatctggagaaaccacgccgcaaaacggaagcgttaatctttggctctcacgacaacagtacgcttgagatgactcagcggatgtccacttatctggatacattgtggggcgcagaaaatgtaccgtggagcatgtattacctgaatggtcaggataacagtctggtgctgatcagtaccctaccccttaaagatctcacctccggatttaaagaaagcaccgtcagcgacattgttgatagtcgtcgtgcagagatgttgcaacaggccaacgccctcgatgaacgcgaaagcttttctaacatgcgccgcctggcctggcagaacggtcattactttacattgcgtactacctttaaccagccaggacatctggcaacggtcgtggcttttgatctgccgattaatgatttgatcccaccgggtatgccgctggacagtttccgccttgagccagacgcgacggcaacgggaaacaatgataatgagaaagaagggacggatagcgtcagtatccactttaacagtacgaagattgaaatctccagcgcactcaactctaccgatatgcgcctggtctggcaggttccttatggcaccttattgctggatacgttgcaaaacattctgctgccactgctgctgaacatcggtttgctggcgctggcgttatttggctataccacattccgccatttctccagccgcagtacagaaaacgtccccagcacggcggtcaataacgaattgcgcattttacgggcaatcaatgaagagatagtcagtctgctgccgctcggcctgctggttcacgatcaggaaagcaaccgcactgtcataagtaacaaaattgccgatcatttgctgccgcatttgaatctgcaaaacatcaccaccatggcggaacagcatcaggggattattcaggcgacgatcaataacgagctgtatgagatccgcatgttccgcagccaggtcgcgccgcgcacacaaattttcattattcgcgatcaggatcgcgaagtgctggtaaacaagaaactcaagcaggcgcagcgtctgtatgagaaaaaccagcaggggcggatgatctttatgaaaaacattggcgatgcgctgaaagaacccgcacagtccctggcggagagcgcggctaaactcaacgccccggaaagcaaacaactggcgaatcaggcagatgtgctggtgcggctggttgatgaaatacagttagcgaacatgcttgcggatgatagctggaaaagtgagacggtgctgttctccgtgcaggatttaattgatgaagttgtgcctagtgtgttgcctgccatcaagcgtaaaggtctgcaactgctgattaacaatcatctgaaagcacacgatatgcgccgcggcgatcgcgatgccttacgacgtattttgctgctactgatgcaatatgccgtgaccagtacgcaattgggaaaaatcacccttgaggttgatcaggatgagtcctccgaagaccgcctgacgttccgcattctggacacgggagaaggcgtaagtattcatgaaatggataatttgcacttcccgtttatcaaccagacccaaaacgatcgctatggcaaggcggacccgctggcattctggctgagcgatcaactggcacgtaaactgggcggtcatttaaacatcaaaacgcgggatgggcttggtacacgctactctgtgcatatcaaaatgctcgcagctgacccggaagttgaagaggaagaagagcgtttactggatgatgtctgcgtaatggtggatgttactagcgcagaaattcggaatattgtcactcgccagttagaaaattggggtgcaacctgtatcacacccgatgaaagattaattagtcaagattatgatatctttttaacggataatccgtctaatcttactgcctctggcttgcttttaagcgatgatgagtctggcgtacgggaaattgggcctggtcaattgtgcgtcaacttcaatatgagcaacgctatgcaggaagcggtcttacaattaattgaagtgcaactggcgcaggaagaggtgacagaaagccctctgggcggagatgaaaatgcgcaactccatgccagcggctattatgcgctctttgtagacacagtaccggatgatgttaagaggctgtatactgaagcagcaaccagtgactttgctgcgttagcccaaacggctcatcgtcttaaaggcgtatttgccatgctaaatctggtacccggcaagcagttatgtgaaacgctggaacatctgattcgtgagaaggatgttccaggaatagaaaaatacatcagcgacattgacagttatgtcaagagcttgctgtaacaaggtagcctattacatgaacaatatgaacgtaattattgccgatgaccatccgatagtcttgttcggtattcgcaaaagtcttgagcaaattgagtgggtgaatgttgtcggcgaatttgaagactctacagcactgatcaacaacctgccgaaactggatgcgcatgtgttgattaccgatctctccatgcctggcgataagtacggcgatggcattaccttaatcaagtacatcaagcgccatttcccaagcctgagcatcattgttctgactatgaacaacaacccggcgattcttagtgcggtattggatctggatatcgaagggatcgtgctgaaacaaggtgcaccgaccgatctgccgaaagctctcgccgcgctgcagaaagggaagaaatttaccccggaaagcgtttctcgcctgttggaaaaaatcagtgctggtggttacggtgacaagcgtctcagcccaaaagagagtgaagttctgcgcctgtttgcggaaggcttcctggtgaccgagatcgctaaaaagctgaaccgcagtattaaaaccatcagtagccagaagaaatctgcgatgatgaagctgggtgtcgagaacgatatcgccctgctgaattatctctctagtgtgaccttaagtccggcagataaagactaatcacctgtaggccagataagacgcgttagtgtcttatctggcatttgcaccgattgccggatgcggcgtaaacgccttatccggcctacgattcccattatttcaacaaattacattaaagtaggccagataagacgcgtcagcgtcgcatctggcatttgcactgaatgccggatgcggcgtaaacgccttatccgtcttagctatcccggcttttcctgaccctctcggcatataacgtcagcgtctgttttatcacatccagcgttaccggcttgctcaggcagctgtccataccggactccagacaccgctgtttctcttcagccaacgcattagcagttactccgattaccggcaacgtcagtcccaactgacgaatgcgttgcgtcaagcggtaaccatccatatttggcatgttgacgtcgctaagcacgatatcaatatgattcttgctaagtacattaagcgcatcgacgccatcattcgcggttttacattgatagcccaagcttcccaactgatctgccagcaaacgccggttaatcggatgatcatccacgaccagaatcatcatatcgtcattatcgctgaccgctttgtccgtactcggcagagcgttagcaggatcgtcgctctccatctcgatcaaataaatacgcgccaacaatgccggtagctcatgcggagcagccacactgtgtacccactcccctggcgctttctccagcggaataccaatatggcgacgacagaaggtcactaccgctctgccctgccattttttactcactacctcgtcagtgatcaacacatcttcgggagtcggttcctgcccttcgtatgttgtaacgacgatgccgctgcgctgcaaactggtttccaggaactgacagaggctcgcattgcggaccgccagccagcagcgtttaccactcaacccttccacgccttttttctgcgggtactgagcgccgtacaacggaatacgcacggtaaactggctgcccattcccggttcactatctacgctgatatcgccgtccatcatgctgatcagtttttcacaaatcgccagacccagaccggtcccctggaaattacgctgtacgcccgttccgacctggaagaagggatcaaacaagcgcaccacttctttcgccggtatccccacgccggtatcgcgaacacggatagagagataatcgccatccgcgcgaacatgcaaaactatacagccggtatcggtgaattttatggcgttactcaacaggttggagatgacctgctgtaaacgcatcgggtcgccatttaaggccactggcacatccggttcaataaagcagtacaagcctaactgcttgcgtaccaccagcggtaaatagttggcggtgatgtggttcatcacttcacgcggactaaactcacgcggttcgatcttcaactgttcgctttcaatcttgctgaaatcgagaatatcgctgataattttcaacaacaggctggaagagttgttcattgccgtcaccagccgatcgacgcctttcggtaactctttggtttgcaacagatccaggttaccgataatgccatacagcggcgttcgcagctcatgactgacggtggcaaggaacatgcttttactctggctcgcctgttccgctgcttgtgccatctcctgcaagctctcttccatcttcacgcggctagaaacatccaccagcacacaaatggccacgttttcattacgatagcggctatggacgaagctgatttgcagattggtattgttgctggtcaggacatcaacaaaattgacctgctgcccacagataatttgcgtcagtcgttggcggtcctcatgcgtaagcatattgagataggtatgcgccagttcgttacttaaaatattgacgccatcagcggtacgcaaaatgcagatacccactggcgcggaggcgacaatcttgcgattgaactgctcatgttcttccagtcgcagggcgtcgctttccgccggaatgaaaatacgtcgctcgtacatccgtgcgagagtaaacaatgcagctccggcaagcacattcagcaaaattgcgttaaggatcaacatgcgaatgcgttccagcaccttatcaaccggcacgctatacacgatgcttaggctactgggtggcagatttttcttcagcaccagctcccggaacccttccgtatagccaaaccaggagcgttcctgcatccagcgaggatcgcccttaattttactttctggtccggtaaggctaatcagggtatgaccattttcatcaagaatggtaacccccatcggcaacgtacccggtaagaaaaagttctccatccggatggtctgctcgacacccaaaagcgcctgcaaccggttcgccagataaactggcgtcaacgcgtaaaaatacccgacgccagggcgcggaccttcgctgatccagtagaggttactgccgctatcatcttgtggtgcatttcgatatttattgatgcgttcatgcaaagctttcaacgcggtatcgcgttccactggcatatcacgcagaccgaaattggccatgcagaggttatcgctgccgattaaaaatacccggtttagatcgtaagccgcagaaaaattatcgcgccagtagcgcataaaccacgccaaactctccagagaacctcgccaggtgttactcattgcggaacaatcggagtcggcaaacagcggttcaaacgcaggcacatccgcctgcgtttctcgtccacgcggggaaagcacaccgttttctgcgcttaagcgattttcggcgatgtacttcagctctttcatcacatcagaggtgcgttgaataaagcgctgagcctgatcggaactcagattaaattcctgacgaatttcgctttctcgctgatgtaacgcattaacgatgtaaaaaacggaactaaaagcaatcaacagccagagcactaacgccaatgctctgaacatgtagcggctggctttcagggttgtacgaaaagaagcaaggtatttcaaaggggcgaagctccgcctcaggtgaccgatggagtgtggttaaggtagcggtaaaagcgtgttaccgcaatgttctctcttctctggaatatgatacaccgccgagaaatcatcaccttaacctctgataatcgtcatataccggacaagactagtggatttcagcatgcattatatgaagtggatttatccacgccgcttacgcaatcaaatgatcctgatggcaatcctgatggtcattgtcccaacgcttactattggttatatcgtagaaacggaaggacgtagtgcagtcttatctgaaaaagagaaaaaactttctgccgtggtcaacctgcttaatcaggcactaggcgatcgctatgatctctacatcgacttaccacgtgaggagcgtatccgcgcattaaatgcagaacttgcccccattaccgaaaatatcactcacgccttccctggcatcggtgctggttattacaacaaaatgctggatgcgataatcacctacgcgcctagtgcgctatatcagaataatgtcggcgttaccattgccgcagatcaccctggtcgcgaagtgatgcgtacaaatacccctttagtttatagtggcaggcaggtgcgcggcgatattttgaatagtatgctccccattgagcgtaatggtgaaatcctcggctatatctgggccaatgaattaaccgaagatattcgccgccaggcctggaaaatggatgtgaggattatcattgtgctcaccgctggtttgctgataagcctgctgttgattgtccttttctcccgtcgcctgagcgccaatattgatatcatcaccgatggcctcagcactctggcacaaaatattcccactcgattaccacaattgcccggtgaaatggggcaaatcagtcagagtgttaataacctcgcccaggcactgcgtgaaacgcggacacttaacgatctgattattgaaaacgctgccgatggcgtcattgccattgaccgccagggtgatgtaaccaccatgaacccagcagcagaagttatcactggctatcaacgccatgaactggtagggcagccttactccatgttgttcgacaatactcagttctacagtccagtactggatacgctggaacatggcaccgaacatgtggcgctggagatcagttttccaggtcgtgaccgcaccattgaactcagtgtcactaccagtcgtattcataacacgcacggtgaaatgataggtgctttggtgattttctctgatttaactgcccgcaaagaaacccagcgccgcatggcgcaagcagaacgcctcgccacactgggtgagctgatggctggcgtcgcgcatgaagtacgtaatccgttaacggctattcgtggttatgtacagatcttgcgccaacaaaccagtgacccaatacatcaggaatatctgtccgtagtactcaaagaaatcgatagtattaacaaagttattcagcaattgctcgaatttagtcgtccacgccacagtcaatggcaacaagtcagcctcaatgcattggttgaagaaactctggtactggtacaaaccgccggcgtacaagcgcgggtcgacttcataagcgaactggataatgaattaagcccgattaacgccgatcgtgaactgctcaaacaggtactactgaatatcctgatcaatgccgtccaggctatcagcgcacgagggaaaattcgcattcaaacctggcaatacagcgacagtcaacaggccattagcatagaggacaacggctgtggcattgatctcagcctgcaaaaaaagatcttcgatccctttttcaccaccaaagccagtggaaccgggcttggtctggcgttaagtcaacgcatcattaatgcccatcagggtgatattcgcgtcgccagtttgccgggctacggcgcaaccttcacgcttattttaccgatcaacccgcagggaaatcagactgtatgactgctattaatcgcatccttattgtggatgatgaagataatgttcgccgtatgctgagcaccgcttttgcactacaaggattcgaaacacattgtgcgaacaacggacgcacagcattacacctgtttgccgatattcaccctgatgtggtgttgatggatatccgcatgccagagatggacggcatcaaggcactaaaggagatgcgcagccatgagacccggacacccgttattctgatgacggcctatgcggaagtggaaaccgccgtcgaagcgctacgctgcggagccttcgactatgttattaaaccgtttgatctcgatgagttgaatttaatcgttcagcgcgctttacaactccagagtatgaaaaaagagatccgtcatctgcaccaggcactgagcaccagctggcaatgggggcacattctcaccaacagcccggcgatgatggacatctgcaaagacaccgccaaaattgccctttctcaggccagcgtcttgattagcggtgaaagcggcaccgggaaagagttgattgccagagcgattcactacaatagccggcgggcaaaggggccgttcattaaagtcaactgcgcggcgctgccggaaagcttgctcgaaagtgaactgtttggtcatgaaaaaggtgcatttactggtgcacaaaccttgcgtcagggattatttgaacgagccaacgaaggtactctgctcctcgacgaaattggcgaaatgccgctggtactacaagccaaattactacgcattctacaggaacgggaatttgaacggattggcggccatcagaccataaaagttgatatccgcatcattgctgccaccaaccgcgacttgcaggcaatggtaaaagaaggcaccttccgtgaagatctcttttatcgccttaacgttattcatttaatactgccgcctctgcgcgatcgccgggaagatatttccctgttagctaatcactttttgcaaaaattcagtagtgagaatcagcgcgatattatcgacatcgatccgatggcaatgagtctgcttaccgcctggagttggccgggaaatattcgagagctttccaacgttattgaacgcgccgtcgtgatgaatagtggcccgatcattttttctgaggatcttccgccacagattcgtcagccagtctgtaatgctggcgaggtaaaaacagcccctgtcggtgagcgtaatttaaaagaggaaattaaacgcgtcgaaaaacgcatcattatggaagtgctggaacaacaagaaggaaaccgaacccgcactgctttaatgctgggcatcagtcgccgtgcattgatgtataaactccaggaatacggtatcgatccggcggatgtataacaccaaaacttgctatgcagaaatttgcacagtgcgcaattttctgcatagccgctcattctccttataaatccccatccaatttatcccttcatattcaattagttaaataactaaatccaataatctcattctggcactccccttgctattgcctgactgtacccacaacggtgtatgcaagagggataaaaaatgaaaacaaaattgatgacattacaagacgccaccggcttctttcgtgacggcatgaccatcatggtgggcggatttatggggattggcactccatcccgcctggttgaagcattactggaatctggtgttcgcgacctgacattgatagccaatgataccgcgtttgttgataccggcatcggtccgctcatcgtcaatggtcgagtccgcaaagtgattgctagtcatatcggcaccaacccggaaacaggtcggcgcatgatatctggtgagatggacgtcgttctggtgccgcaaggtacgctaatcgagcaaattcgctgtggtggagctggacttggtggttttctcaccccaacgggtgtcggcaccgtcgtagaggaaggcaaacagacactgacactcgacggtaaaacctggctgctcgaacgcccactgcgcgccgacctggcgctaattcgcgctcatcgttgcgacacacttggcaacctgacctatcaacttagcgcccgcaactttaaccccctgatagcccttgcggctgatatcacgctggtagagccagatgaactggtcgaaaccggcgagctgcaacctgaccatattgtcacccctggtgccgttatcgaccacatcatcgttagtcaggagagcaaataatggatgcgaaacaacgtattgcgcgccgtgtggcgcaagagcttcgtgatggtgacatcgttaacttagggatcggtttacccacaatggtcgccaattatttaccggagggtattcatatcactctgcaaagcgaaaacggcttcctcggtttaggcccggtcacgacagcgcatccagatctggtgaacgctggcgggcaaccgtgcggtgttttacccggtgcagccatgtttgatagcgccatgagttttgcgctaatccgtggcggtcatattgatgcctgcgtgctcggcggtttgcaagtagacgaagaagcaaacctcgcgaactgggtagtgcctgggaaaatggtgcccggtatgggtggcgcgatggatctggtgaccgggagccgcaaagtgatcatcgccatggaacattgcgccaaagatggtagtgcaaaaattttgcgccgctgcaccatgccactcactgcgcaacatgcggtgcatatgctggttactgaactggctgtctttcgttttattgacggcaaaatgtggctcaccgaaattgccgacgggtgtgatttagccaccgtgcgtgccaaaacagaagctcggtttgaagtcgccgccgatctgaatacgcaacggggtgatttatgattggtcgcataagccgttttatgacgcgttttgtcagccggtggcttcccgatccactgatctttgccatgttgctgacattgctaacattcgtgatcgcgctttggttaacaccacaaacgccgatcagcatggtgaaaatgtggggtgacggtttctggaacttgctggcgtttggtatgcagatggcgcttatcatcgttaccggtcatgcccttgccagctctgctccggtgaaaagtttgctgcgtactgccgcctccgccgcaaagacgcccgtacagggcgtcatgctggtcactttcttcggtagtgtcgcttgtgtcatcaactggggatttggtttggttgtcggcgcaatgtttgcccgtgaagtcgcccggcgagtccccggttctgattatccgttgctcattgcctgcgcctacattggttttctcacctggggtggcggcttctctggaagtatgcctctgttggctgcaacaccgggcaacccggttgagcatatcgccgggctgatcccggtgggcgatactctgttcagtggttttaacattttcatcactgtggcgttgattgtggtgatgccatttatcacccgcatgatgatgccaaaaccgtctgacgtggtgagtatcgatccaaaactactcatggaagaggctgattttcaaaagcagctaccgaaagatgccccaccatccgagcgactggaagaaagccgcattctgacgttgatcatcggcgcactcggtatcgcttaccttgcgatgtacttcagcgaacatggcttcaacatcaccatcaataccgtcaacctgatgtttatgattgcgggtctgctgctacataaaacgccaatggcttatatgcgtgctatcagcgcggcagcacgcagtactgccggtattctggtgcaattccccttctacgctgggatccaactgatgatggagcattccggtctgggcggactcattaccgaattcttcatcaatgttgcgaacaaagacaccttcccggtaatgaccttttttagttctgcactgattaacttcgccgttccgtctggcggcggtcactgggttattcagggacctttcgtgatacccgcagcccaggcgctgggcgctgatctcggtaaaagcgtaatggcgatcgcctacggcgagcaatggatgaacatggcacaaccattctgggcgctgccagcactggcaatcgccggactcggtgtccgcgacatcatgggctactgcatcactgccctgctcttctccggtgtcattttcgtcattggtttaacgctgttctgacggcacccctacaaacagaaggaatataaaatgaaaaattgtgtcatcgtcagtgcggtacgtactgctatcggtagttttaacggtagtctcgcttccaccagcgccatcgacctgggggcgacagtaattaaagccgccattgaacgtgcaaaaatcgatagtcaacacgttgatgaagtgattatgggtaacgtgttacaagccgggctggggcaaaatccggcgcgtcaggcactgttaaaaagcgggctggcagaaacggtgtgcggattcacggtcaataaagtatgtggtagcggtcttaaaagtgtggcgcttgccgcccaggccattcaggcaggtcaggcgcagagcattgtggcggggggtatggaaaatatgagtttagccccctacttactcgatgcaaaagcacgctctggttatcgtcttggagacggacaggtttatgacgtaatcctgcgcgatggcctgatgtgcgccacccatggttatcatatggggattaccgccgaaaacgtggctaaagagtacggaattacccgtgaaatgcaggatgaactggcgctacatagtcagcgtaaagcggcagccgcaattgagtccggtgcttttacagccgaaatcgtcccggtaaatgttgtcactcgaaagaaaaccttcgtcttcagtcaagacgaattcccgaaagcgaatagtacggctgaagcgttaggtgcattgcgcccggccttcgataaagcaggaacagtcaccgctgggaacgcgtctggtattaacgacggtgctgccgctctggtgattatggaagaatctgcggcgctggcagcaggccttacccccctggctcgcattaaaagttatgccagcggtggcgtgccccccgcattgatgggtatggggccagtacctgccacgcaaaaagcgttacaactggcggggctgcaactggcggatattgatctcattgaggctaatgaagcatttgctgcacagttccttgccgttgggaaaaacctgggctttgattctgagaaagtgaatgtcaacggcggggccatcgcgctcgggcatcctatcggtgccagtggtgctcgtattctggtcacactattacatgccatgcaggcacgcgataaaacgctggggctggcaacactgtgcattggcggcggtcagggaattgcgatggtgattgaacggttgaattaatcaataaaaacacccgatagcgaaagttatcgggtgttttcttgaacatcgacggcgaaggtaaccccattaatcaccagtcaaaacttttcaccagcgtcagctcgccagcattacgcatcggtacaataaatgtttcctgtttctcattgacgcttccttcatcggtgatcagcgtcagttgggcggtggttaattccgtttcgctgcgcccaccatagtagttgatatacacctgatagcgcccgtgaattggcgcgggcatggcgaaaatctcgggtccgtaccccgtcgtgacatccatatccagtgcaccactgtttttcagcacggtgttaccgtaccaggcgtgttcgccatcgggcgtaacaacgtgaaggtcgaggtcggtattgtccgtatcccagctgagaaccagccgtaaacgtgcacgaatcgttcctgtacccggcgtactgtaaaactgcattttttgtcggctttgcccatccgggctgatgacctgcacgctgttgctgccttcagtgaaaatataagggcgtgcaaaactaccatcggattcaattctctgcggcatactggcaccgttgaccaccagccggccctgctgaactttacccgccgcagcataattctttattttgccgcggatctgcgcactgatattttgatcatctgccatgttgacggagctcgccgggtaattgatgctttgactaaaactggcatcttcgccctctgccggatgccagccactgagcggtgcatcaatctcgacttcctgcacaccttcactgtgagcgacagggctaagcgccaccagtaacaacggaagaaaaatctttcgcatagcattagtccattaataattgtcgggtcagcgtttcgatatagttctcatcaagcccggtgggataaccatcaaaggccaggtgcagatactcatgggttaaatccagccgatcctgaagcgtaaagaagttacgaataaacagccgtttctgctgccgatcggtataggggaaaccactgactaaacggcaaaccgcaaacacgtctggttcgttgtaccccgtctcagcttgtaatatacgccgccactgcggcatttttttcgccagccaggctttcgctttgggtaataactggcaggtactgcgtggcgctccccagcggctaagactgttgtcgggataagcaaacgcgagtatctgatcgtaacgctctccctgccccgcctgggccgtggcttgccgccaggaaagtgtcccttcggtagcgcgactgccatgataatgaaccggatcgcctgcatagatgagatcctgcgtccaggcggtcatcgttcgcgcccccgtggtcgctgggctagcagaaacacgctgcgtggcgctgctgtcggggatggtcaggcaatcgccttcccgattggcgttttgctgtaaaaaagtgcgaatcgccacggtcatggctttcgctgcctcagggggcgtacttttcgcctcgcgatccagaactctggcaacgtactcttcacgatcgagatggctctgcaatttcagtttgcccttttcgctcagtaaggtcgtctcaccgtggctgacaaacgtaatgtggttaccattagtaaacgtcacacgatagcgcccattaagtacgccgggatttactgccgtcgtactcttttccgctgtgattttcttcagcggatagcgggcaaacagctccacctctacacattgcccactggcaacctgcgtcggtactggcaaaacccgattaagcaccgtcgcataacgggttagtaccgttttgctggtgccactgccagtaacccacagcggtgtaccatcggttaaccagccagcaaaaccaccctgacggatttcctgtttatcatcggcaaaccagctccaggttttcacccgtacccgactaccgagcatggatgcgacaccgattttcgcctcgtccagcaccacatccagtaagacttcctgagctttgttttgcgcgggtaacgtcgctaaactatcaagcaggcttttaaccgttacgctggtttctggcttcagcgtagtcagagacgctaaccacgcaggtgcctgacgctgttgccagtattgcccccacacatctgcgccaatatgcaaccgctgcggcgcaaaatagagcccacaggaacgtaccagcgcggtatcgcgcgttatgctctccccagcctgacaacaataaacctcttccggggagtttccgcgacactggtagggctgctccggttgatgggtatcctccagccaggcgtaaacatacagtttccacaaactccctaacggcgtggtgaggctgtcaggtaatgcactgactttggtcacgccactactgctcagctgatacagttgatcgtgctgcgcaccgcgcagcaccagttgtaacggcgtctcctccgcaagtgttggcagagtaaccaacgccaatagccagacgattcagcgccagttcacttatttcacctgcatcccggtccattcactccctgccgcaacactttgctgcgcaggtgcataggaacgcacataacgagcaggaggcagaacgaattgccctttttgcgagaagcgcagcaaatggcggaaagtgaccgttcccgtcagttctttcaccggcaccatataggccagttcgcccatttcatttcgcgctttttccagcaattgcccctgctgtttcgcggcgttgggtttattgaccgaaatgccccatgttgtgcgctcaacgtcggctcccggtggcagcggtacttccacctgaccgtagcgcagaactgcatcctgctcgctggtaagcgtgatttcatcgagatacagcgcatcgctgtcaatctcattgctggtcaccggttgcagaataaagctcatctcttcttcaccagggataagccgatacaactggcgttcaacggtcaccggaatgttactttgttgagccatttttgccggctcacgtcagcggacctgcacattttgcggcgataattcgtcaccaaaagagagaatgtccggcacgccctgaccaacccaacgccagtcttcgccccctccagttaacttatgtttagcccatgcgcccgcaggcgcaggcaaaacaactggaggcattgtcgccatatatttcgccagccagttcatggccagcgcgcgctcaatagtggattgctcagcggtcaaaccacttaaaatagcggccgtctgggtagcgtcgccaccgctattaagcagcacaaccgtgtgcgccagcggctgattgctgtttgccgctttatcccacgcatattgctgaacctgtggcatcaccgtggacttcaactgcgcttttttcagcaacgtcatggttaagacgtttgccaccgcatctgccagtggagactccggtgtatcgaggatcaggctatcattgatatcgcgggtgtcttcctcagagaaatcttcagttttagttccgcgccgggcgatagcttcatccaaccctttcaacaacgttttgcacggcaaattcatctcctgcgcccatgccagcaccagcgcccgatgcaataacggcatgttatctgcctgctccgcgtagctgtcgagcatatgctgccagtattccggttgttgcgttacgccgatcgcctggctggcctgccagtcggcgtaccatgcccatgccgtaaggaaggcgtcaccattgccatcttcaccccaccaggtaaagcgcgctccgggccccgccagttgcatcagccgcagacggttatcctgaatcatctgacgaatgtcgttagcggcggcactttgatgatcggcaagcgaacgccaggcgagactgagcgggatcagacggctaccggtgttgattacgccaccccacggttcatcgactaacgcatcaagattgttgcggaaaatctcctgcggcgtttcactactttgtagccggatattgctcgcctgctcgggcaacatcagcgcgttatcgccaccaccgagcatgacatttttctgctgttcaacgggccagctgttatccacaaaagacagttttgtgctaatgctgtcctgcacttgcccattttgttgcagttctgcacttaacaagccagattgctgaatattctgcgtcagcgaaatataattcgcccctttgtgcagcgtcagcgtctggcgcatctcagcgcctgcaaatttagtcaccagcgccaccggttcgttatcctgctgactgaagataaatagtcctgccgccggtttgtcgcccacgcgatacaccgttggcatactccacttcatgtagagatttttttccgaacgcagataagcacgcccctgcccgaccagcccgtcgccgttcatcccacgcgcggtgatacgccagcgggttaacgaatcaggcatcaggaacgtgaaatacgctttgccttgtttatcggttgtgagtgacggcatccatgccgcggtatccacctcttcacgccgtggacgttcaagcatttttactcgccgctcgctgcggttagttgcgccaggcgcaaccggctcgctggagagcgcctggtcgtagctgataaacgacagactggagctggtacgcacattgttacgccccagcggatagaaaaatttgccgatattcggcgcgatttctggttgcagcgcgtagatcatttcatcgaccacgcctaccgttagctgcgcagaaacaggtttacctttcagcgacgaggttaattcgacattgaccagttcaccaggctggtaatgggttttgtccgttttcacccggatatccagctggggaacggcaactttgatcccggcgttctgaaaactgtactgaccgttacgggtatacagcaccgaaaaagtgatgttaggcgcaaaggaattgctcactggaacccgggcttcatactgggtatcgtttaaacgttgtagcgttagccagtttgccggatgcgaaagcagcgactgctgttccacgcgatcgcgttccagcgtcaataatgcttcatcaattggctccggaaaggtaatcagcatcttcgcggtttcgcctggctggtacagcgttttatccgccacgatatctaccgtaccagtatgcgccgtgctgcccttaccgctgacggcatgacttaacccagcgagaattaagccgtctttatcgcgtaatgtcagattgtagttgccaggtttagcgaaattgacggtaaaggatttgccgcctgacggtagctctccgctatggctcgtgcggtcttcgagacgcaaccattcatacgtaacaggaacctgttttgaagattccagcgcggcataacggaacacaaccgactcgccgctattactgtattgtgcggcagtacttaatgagtaatgcgccagaccgcgttcaatgaggatctctttggtggtggtgacgcgatacgccgcgccgtcactggcggagacggttaacaaatagcggctcggtttatcggcggcggggagatttaacgccacatgaccgctggcgtcggacaccgtttcgctgccttccagcgacacggggaaacgtccggcataacgcaaatcgttaccgaccattgataattgctgagcgcgcaaacttaactgcacgcgggcattttttaccggctcgccatccgggtagagcagttgcagtttgccgctgaccgcttcgccagttttgaactcttttttggcgagagctaaaccaatctcgaaatgtggcttgatgtagtttgccacgcgaaaactgctgctatagacctgattgcggtaagcaagacgtaactcataacctccggctacgacattttctggcaggcggaaacttccctgcccgccattgcgcgcatccagcgtgacattgacggtttgcaacagactgccgttggcgtccagcaccgaaagcttcgccggggcgctgacgatgggggatgaatgcaacggatcgtggaactcgcggccgatcactttaacatcgacacgatcgcctgcgcgatatagcgggcgatcggtaaaaatatacaagcgggtgttgtagatttcgctttcgtagaagaagttctcggagacaaaaacgccgccttcagcatccttacccagaatgtatgaacgttctggcgatatatgttgtaactgcaaggtaccgctgtcatcggtcacaccgcgggtcatcacgccaagaccgtcagtccacaagatctctgagccgggcttcgcttcaccctgttttttacccgcggtccacaccagaagctctttgcctgacactttgctaagcgccacggtatcggaaacaaacaccaccgtcgtcgcccgatacccaccaaccatcgcctcgacgaggtacagtcccggctcttgttggccgagaggaatataaatgttacccggctgcggcgagatgaaattgctggatgcgccttccagttttaccccttgctgcggctcgaacggtttagcctgccatagtggataacggaactgtttcaccaggggatattttttcagcggggaaaactggttgttctgtacataacgggaaggtttaataatggcattgccgagctgtaattcgggtaacgcctgagtcacattctgccgtgactgagaagagaaagtacgctgcatcacgcggcgagatttgccgtaccagttatcccacagccaggttagcgtattgttcagcccgtcgcccagatattgcggttgcaccacaatgcgatgcaggtttttctgctggcgcaaaaatgccatcgggtcaggaatacgatacaggcgaacgtccacgccgccgtactcttccatctgatagcgccgataatcacgccccggcgcttccagtcgcactttcgcctcttcactgctgctaaaactgctgtcagcaagcaaaaagaatgttcccccggcaggcggcgcatagttgctggaaggaagcgaatcatcagcattagcaagccctgttcccacaagagacagggacaagcacgctgttatcgcgccagaaaatttaaacgataaatgccaatgaaattgggattggaatcgttgggtatccatcgggtgtccttccatgtcataagttgttgcagactgactgcgcgcattccgttgtcagttttcgtggcgcttccggtgtggtagatgacgtaacgccccatccagaccattaagtgctgggcatcgccctgatcgaaaaaaatcatatcgccaggcagcgcctggtttatgtcctggccaataaactggctgttgtactgaatcaaattaatcgcggtcacataggggccggttttcccgttcccctgattccagttttgcgccagttgacgctgttcaggtgttagcgtcatctctggcggcaaatactggctagataaaccgttactttttagccatttactgtcgtgaactttcagcgtctcgttcgccgcaaatcgcaccaggcccgcacaatcctgctgataccagcgtggacttggcccctggcggagctgttcttgtgcaatgcgtacaaaccaggcgcgaaacagcccggattgttcgacattcagcatttcgctatgggcaacaacacaacacagccagcaaatcagcgccagcagcccgtgcctcatagcggctgccaggttatgggtagccactgccaggcggcaccgggttccatctgggccagcttcatgacataacgcggttgttgagataaagcgtccagcttcggcattaataaagtttgtgcggcgttataaaaaaccggttcgagattcttcggcagactggtcaacgtttcgttacgcagcagtttcgctattccttgtggattgatatagagcggaacgatgccatcagtgggtattacatccaccattgccgggcgggttttattcagtgtttgcagcgcgttattaaccagcgtgtcatcgagggagaaaagcagcgttttgttttgcatcgccaggctcacacggaaaaaataatcgctcattaattgatcgggttgcgccgcctgcgctttcggatactggccgtatcgggaactcacttcgcgacgccagatttgcgcttcgccctgctgagtctggcttaccggcaaaacaccttctggcgctttgctttcgtgcgcaccaatattttgcgtaaacagtttccctggcaattgcgcctgttcggcagtgccatcaaactgaccgacaaacagcggggtttgcaatttactgtcttcataccagcacagccccgcggcaccgtctaacgccccattcagcttgtcgttttcctggctgatgtggctaagcatctcttcggcaataccgtgactatacggcaccgccacacagaagctggctccggcaggcatactgttccataccggcgtaaaatcgaaactggcatctacgctggcggattcatcatttaacgccacaaaactgtgccagccgtcgttacccatttcgaagcgtacgccagcaaaagaaggcattaaccgctggtagccaaaccccagccacctggcgctgactacgatgcgctggcgtactggcgttttttcggcagtacgctcttccaggccaaagcttgcttgccagcgttttttgccgctcaacaaatcacctgcgatcgccgtggcttcggtatcctgctgatcatctttaaacaacatatccgtgctggaaaacaccagcatcttgtcctgataagtcgcgaacatcagggcgttattgccgttatagcgcaactgataaacaggaacagtttcactatttatcttgatgctactgatttccgttttgcttaactggctgtcgctggtagcggcaaacaacaatggctccagcagtttgcttaaaccactgcgctggatcagcaccatataatgactaagatggccttgtttatcgtgccacagcgctgcctgcgcgggctgatctaagagactgctaaagagcttatctttcagcgtgagatcgtgttcatagacaatacgacgaatgctgccttcaatgcccagacgatcggcatgattctgataatagaaaacgaaatcttcgctcagaacatcgtggagaaacggaatggtgaggagatctttgggaagctggctcagagagtcgctgtcgagaaagaggtccggctcattgagatcgatttgcagattgttgtgcaccaccagcgggctcaacgttttttctggcccactgccagcatattgcaacgcccagacgccagcggaaagcagtgctattgcgccaaaacctacaagaccatagaaccgccagcctttcgccttttttcaccactcattgccacattccttgtgtatagccagccattttttacgggcacagccaaactttaccgtgccctaatacgacaaaagcccagactttgcagcctggacttttcaattcaaacaagggagatagctcccttttggcatgaagaagtaaaattattcttcttctggctcgtcgtcaacgtccacttccggagcgatttcatcgtccccttccgcggcactgccgtcgatggtatccagatcttcctcgtcaaccggttcagcaacacgttgcagacccactacgttttcatcttccgcagtacggatgaggatcacgccctgggtgttacggcccacgatgctgatttcgctaacgcgagtacgtaccagcgtaccggcatcggtgatcatcatgatctggtcgcagtcatctacctgtaccgcgccaacaactaaaccgttacgttcggtaaccttgatggagataacccctttcgtcgcacggctcttggttgggtattccgccactgcggtacgtttaccgtaaccgttttgcgttgcggtgaggattgcgccatcgccacgaggcacgatcagagagacgactttatcgccttcacctaagcgaataccgcgaacaccggtggtgttgcagcccatcgcacggacagaagactctttaaagcgcaccactttaccttcagcggagaacagcattacttcgtcttcgccgctggtcaggtcaacgccgatcagctcatcgccgtcaaccagtttgatcgccactttaccggcggtacgcagacggttgaactcggtgaggacagttttcttcacggtaccgttagcggtcgccatgaagactttcacgccttcttcaaactcggtcactggcaggatcgcagtgatacgttcgtcctgctccagcggcagcaggttgacgatcggacgaccgcgcgcgccacgagtggcttccggcaactgataaactttcatgctatagacgcgaccacggctggagaagcacagaatatggtcgtgagtgttcgccaccagcagtcggtcgataaagtcttcttctttaatacgtgcggcagatttacctttcccgccacgacgctgcgcttcgtattcagaaagcggctgatacttaacgtagccctggtgagagagcgtcacgaccacatcttcctgggtgatcagatcttccaggttgatgtctgcgctgttggcggtgatttcagtacgacgtttgtcaccgaactgttcacgaaccagctccagctcttcacggatcacttccatcagacgatcggcgctaccaagaatacgcaacagttccgcgatctgatccagcagctctttgtattcgtcgagcagtttttcgtgctcaagaccggtcagtttctgcaaacgcagatccagaatcgcctgagcttgctgttcggtcaggtagtacagaccatcacgcacgccgaactctggctccagccattccggacgcgcagcatcgtcgccagcacgttcgagcatcgcggcaacgttgcccagctgccacggattagcaaccagcgcagttttcgcttctgcaggcgtcggcgcatgacggatcagttcgatgatcgggtcgatgttcgccagcgccacggctaatgcttcaaggatatgagcacgatcgcgagctttacgcagttcgaaaatagtacgacgggtcaccacttcacggcggtgacgaacaaacgccgcgatgatgtctttcaggttcatgatcttcggctgaccatggtgcaatgccaccatgttgataccgaaagaaacctgcaactgggtctgggagtagaggttgttgagcacaacttcaccgaccgcatcgcgtttcacttcaatcacgatgcgcataccgtctttgtcagactcgtcacgcagcgcgctgatgccttccacgcgtttttcttttaccagttccgcaatcttctcgatcaggcgcgctttgtttacctgatacggaatttcgtggacgataatggtttcacgaccggttttggcgtcaacttccacttctgcgcgagcgcggatatacaccttgccgcgaccggtacggtaagcttcttcaataccgcgacgaccgttaatgattgccgccgtcgggaagtccggccccgggatgtgttccatcagcccttcaatgctgatgtcttcatcatcaatatacgccagacaaccgttgatgacttccgtcaggttgtgcggcgggatgttggttgccatacctacggcgataccggaagaaccgttcaccagcaggttaggaattttggttggcatgacgtccggaattttttccgtgccgtcatagttatcaacgaaatcgaccgtctctttttcgagatcggccatcagttcatgggcaattttcgccagacggatttccgtataacgcattgccgccgcagagtcgccgtcgatagaaccgaagttaccctgaccgtctaccagcatataacgcaggctgaatggctgcgccatgcggacgatcgtgtcatagaccgcgctgtcaccatggggatggtatttaccgattacgtcaccaacgacacgggcagattttttataggctttgttccagtcattgcctagtacgttcatggcgtaaagtacgcgacggtgtaccggcttcaggccatctcggacatctggcagcgcacggccaacaatgacgctcatcgcataatccagataggagctcttcagctcttcctcaatgttgaccggtgtaatttctctcgcaaggtcgctcatctaaccgctatccctctactgtatcccggattcaaaggtcgcaaattataacacagccgcgcagtttgaggtaaacctatacgctttattcacatccaatgcctgatatactcgtttgtcttgccaattacggagtagaagtgccaatgaatgccgaaaaaagcccggtaaaccataacgtagaccacgaagagatcgctaaatttgaagccgtcgcctcccgctggtgggatctggaaggtgagttcaaaccgctgcaccgcattaacccgctgcgtctgggctatattgccgagcgtgctggcggtttatttggcaaaaaggtgctcgatgtcggttgtggcggcggcattctggccgagagtatggcgcgcgaaggcgcgacggtgaccggtctggatatgggctttgagccattgcaggtggcaaaactgcacgcactggaaagcggcattcaggtggattacgtgcaggaaaccgtggaagagcacgcggcaaaacatgccgggcagtatgatgtggtgacctgcatggagatgctggagcacgtccccgatccgcagagtgtggtcagagcctgtgcgcaactggtgaaaccaggcggcgatgtctttttcagcacacttaaccgcaacggcaagagttggctgatggcggtggttggtgcggaatatattttgcgcatggtgcccaaaggcacgcatgatgtgaagaagtttattaaaccggcagaattgctgggctgggtggatcagaccagtttaaaagagcggcatatcactgggctgcattacaacccgatcactaatacttttaaactcggccccggcgtggatgtgaactatatgctgcacacgcagaataagtgaggttgatgtttggccgcgccaatgcctgatgcgacgcttgccgcgtcttatcaggcctacaaatgctccccgtaggccggataaggcgtttacgccgcatccggcaaccgtgccgactagacagtgattaccatttcaccgtcatgctcaaaaaccctgccgtctgggcaaaatcatcactccctttctgccacgccacgctgccgcgcagggacactcgctgactgatattgcccgtgactcccacttttatttcaccccgttgcttcaccgcatcgtcactgatagtgctgccatcctcttcaatttccgtgctatggggatcgtgataataattcagatctaatgttggtatgacatgaacagcggtacgccattcgctgtgtaaacccagccgcgtctgaatatcatcaccctggctttgactcacgcgcgcacggttagcggcggtaaaatcatcctgctgcacgccctgataaatcacctgcgcctgcggttcaatcaccacaccacgccccggtaaccactgataccccgcctccaggctggcgataatcccgctgctgtggtaatgatctgtgccatcttcttgttcggaaacatcattgctaaaccacgcgtattgcagccagctatccagccaggccccttgcttctgattaccgtgctgaaaccagctacttgtcagcccaacggcataaccgtggttctggttatcggcgcgagttccggtcatattgctgcggctgtcgccctggttatcgctgtagccaccaacaatcccaagcatccactcgccatccgtgccccagcgcccgctaaacagatcgccgctaagttgcaccgtagaagtgtcttcatgttgagccagttgccccgctgctgtgtaatgataatctccgccgataacacgtaaattcagcgtctgaccatcgccacctgcgtgatcgcgtcgctccatcataaacgcctgatttgccgcccgcaggttattaagataaccgccaactttggcattcaacaccggctggtaagcaggcgtaggttccgggtcgggtgttggatcaggatccggcgtgggatcaggatcgggagtcgggtctggatcaggtgggcttggcggcgttacttcttggcttcgcagataccagtcgttgttatcttccaccagcgtgtagtcatacgctcccatattgacgtagccgctgcctgccagactgaactgcgcattgttttgaaactgcgtgggatcagctgcgaaatcaaccactttaatgcctgtgcttgtcggctcaccaatccctgtaatggagttaaccaccacagttgtgttgccagcagtattaccgttcatcaccaattgatcgcttacgctgtcatcgccgtttaattcgctatcgagcagtagcgtaccgccgccggtataatcaccgtttaccgtcagcgtatcgccagcgacgccattttgcaggctaaccgcaccggacgtattggtcagattgccattaaccgtcacgttggaaagataagtcaggctgtcagtttcaaggttggtattaagctcacctgtcaacgtcacaccatcggtggcattcaccagcgtcccatcgccgttaaatagactggcattaagggcgacggaagtatcctgcccggtcaggcgcaaaaccgtaccatcgctgatgtcgatagtgccgctggaaatagcatcaatactctgaatatcctgatccgcgccagtaacgaacgttgccccatcaccaacccacagactgctagcataaggaaggatatcagcaacatcacctttcagggtgccttcttcgacacgtaccgcgctctgcgttgtaccgctggcggtcagctccagtgtaccagcccccgttttagtcaatgtactaccctcatcctgatgctgcccgctgctgtcagccatcagtgcgccccactgcgtgtctacccccgcatcaactgccacttcaccgtcggcgcgcatttcaatatcacgtccgtggcctgccgcatcactacgcgtgtcaacgtcggaggtaatctccatcacgctttcttgttgcttatcggtaaagataacctggcggttatagtgggtatctccaagctggctgttgtcgctcaccatcagcgtaccggaggcgatttgtgttgtgcccaaataactattattgtttgccagacttacctgcccgtcgctcgcatcgaccaccacgtagacgccatctttcccgtcgccgccgatatgcaaattgtcgccacctgcaagatctaccacatcctgactgccgataaccgttccgctgctgccactgacttcaaggccatcgttgtaacttgtgccgctctgccaggtggagaaatcagagagatcgagcacaccgccgtttaacacgatgctctgcggatcgtcctggagagcggtaagatctgccgcgtcgccttccaggctaagcaccgcaccatcatcaacgactatatcgccggttagcgccatgctctgcgcccctgccagcacgtagctgccgttttgcgcaatggtgagctgaccagcaccttcgatgatgccagcaaaactgccctgattaacagtaacgttgccaccagcatcgatatttaaagtgccattctgaaagcccgtcaatgcgtgcacaaaagtttgttgggtgctgccaacgtttagctcagcctgattctgatactgatcaatactccctatcgtcagaccgtagcagtcttgcggatcgtcctggcaatgcgtatcgccgacattcatcagggagttgctgcggcccagggtaacttcaccgttttcaatctgcatctcaccagtaaagtcattgttatctgcattaagtaccagatcgccggaacctgttttggtgattaacccggtaccagcaatagagtcaacagctccgtcattctctgtattgccaataaccagcgtttttccgtcggcaatatcaaaggtaacttcacttaagccgagatacataaagccacccgccgcagaggaaggaccatctccatagcctgctgcgctattgttctcatcgactaacacgcctccgttctggctgtagctgtcatcaacagaaatatcaataagatagggagccgtcacgctattggtatatatcgccccgccataaccttcggcagtgttatttgtaaaggcagtgttatttactatcgtataaccactaggatgcttgctgtcgctattattatcggtaacatcgattgccccgccatcgccatcactgtaacttgtacttgtatatgcctggttgttatcaaaaataacatcacttaaataaacgtcattattaatggtataaattgcgccacctttgccatcattagcgatgttattgcgaaacatggcgttagtgacacgtaaatcgacggcaccagtatcgttagtaccagaagaatagattgcgccaccatagccgcctgcgacgttaccggaaaaaataacatcagtaagattcagcgtactgttttctttagcaaatatggccccgccgttattatattctcctgtaacggtgttattggcaaacagagtcattccagtttcattttctggtaatagactaaattccgctccttgttgcaaaaatacggccccaccgctggcgttattggtcatatcgctaaaaaccagccattgcccatcagcgatactccagtcctgcgtaatgccactaaggctttgcctgctggcctgacaactcgctttgacatcatatccctggcaactatcagtgaccgccgcgacaccgttagcagagaaaagagatgcaatcatactcgggagtaaagataaatactccttgcgtagaaagataatccgcatattaatctaaccatcattttctataagacggcgtatttaatcgcattatacgatatggaatatctttcttttgtaaattgttcaacccggtgcaatggctattttgttattatttgatgaataatatcagtgcgtcataattcaagttaataaccttcagggatatcagttatatttaaactaaattaaagtcatgaataattttcttataatataaggtaaattaacaaaatggcttagcatttaacaataaccgaatagaaaacaaccatttcgccatcaacaatctcttacattcgcttatatattgaccacaactgatacatcagattatgtgatgactcgtgcttagatcaatttttgcaatcattagcaaaaagattaataagccatctatatcaatttatctaacctattatgccgttcaagaaatcgccgaacagttatttttaacaaatttttctcttcccattgactttcccggacaccttgtctgacctaaggtgcgcgaaagccactttttccttcctgagttatccacaaagttatgcacttgcaagagggtcattttcacactatcttgcagtgaatcccaaacataccccctatatatagtgttctaagcagcttcccgtactacaggtagtctgcatgaaactattgcggaaagaattccaaaaacaggtacgacatacatgaatcagaatctgctggtgacaaagcgcgacggtagcacagagcgcatcaatctcgacaaaatccatcgcgttctggattgggcggcagaaggactgcataacgttagcatttcccaggtcgagctgcgctcccacattcagttttatgacggtatcaagacctctgacatccacgaaaccattatcaaggctgccgcagacctgatctcccgtgatgcgccggattatcagtatctcgccgcgcgcctggcgatcttccacctgcgtaaaaaagcctacggccagtttgagccgcctgcgctgtacgaccacgtggtgaaaatggtcgagatgggcaaatacgataatcatctgctggaagactacacggaagaagagttcaagcagatggacacctttatcgatcacgaccgtgatatgaccttctcttatgctgccgttaagcagctggaaggcaaatatctggtacagaaccgcgtgaccggcgaaatctatgagagcgcccagttcctttatattctagttgccgcgtgcttgttcagcaactacccgcgtgaaacgcgcctgcaatatgtgaagcgtttttacgacgcggtttccacatttaaaattagcctgccgacgccaatcatgtccggcgtgcgtaccccgactcgtcagttcagctcctgcgtactgatcgagtgcggtgacagcctggattccatcaacgccacctccagcgcgattgttaaatacgtttcccagcgtgccgggatcggcatcaacgccgggcgtattcgtgcgctgggtagcccgattcgcggtggtgaagcgttccataccggctgcattccgttctacaaacatttccagacagcggtgaaatcctgctctcagggcggtgtgcgcggcggtgcggcaacgctgttctacccgatgtggcatctggaagtggaaagcctgctggtgttgaaaaacaaccgtggtgtggaaggcaaccgcgtgcgtcatatggactacggggtacaaatcaacaaactgatgtatacccgtctgctgaaaggtgaagatatcaccctgttcagcccgtccgacgtaccggggctgtacgacgcgttcttcgccgatcaggaagagtttgaacgtctgtataccaaatatgagaaagacgacagcatccgcaagcagcgtgtgaaagccgttgagctgttcagcctgatgatgcaggaacgtgcgtctaccggtcgtatctatattcagaacgttgaccactgcaatacccatagcccgtttgatccggccatcgcgccagtgcgtcagtctaacctgtgcctggagatagccctgccgaccaaaccgctgaacgacgtcaacgacgagaacggtgaaatcgcgctgtgtacgctgtctgctttcaacctgggcgcaattaataacctggatgaactggaagagctggcaattctggcggttcgtgcacttgacgcgctgctggattatcaggattacccgatcccggccgccaaacgtggagcgatgggtcgtcgtacgctgggtattggtgtgatcaacttcgcttactacctggcgaagcacggtaaacgctactccgacggcagcgccaacaacctgacgcataaaaccttcgaagccattcagtattacctgctgaaagcctctaatgagctggcgaaagagcaaggcgcgtgcccgtggtttaacgaaaccacttacgcgaaagggatcctgccgatcgatacctataagaaagatctggataccatcgctaatgagccgctgcattacgactgggaagctctgcgtgagagtatcaaaacgcacggtctgcgtaactccacgctttctgctctgatgccgtccgagacttctagccagatctctaacgccactaacggtattgaaccgccgcgcggttacgtcagcatcaaagcgagcaaagacggtattttgcgccaggtggtgccggactacgagcacctgcacgacgcctatgagctgctgtgggaaatgccgggtaacgatggttatctgcaactggtgggtatcatgcagaaatttatcgatcagagcatctctgccaacaccaactacgatccgagtcgcttcccgagtggaaaagtgccgatgcagcagttgctgaaagacctgctcaccgcctacaaattcggggtcaaaacactgtattatcagaacacccgtgacggcgctgaagacgcacaagacgatctggtgccgagtatccaggacgatggctgcgaaagcggcgcatgtaagatctgatattgagatgccggatgcggcgtaaacgccttatccggcctacggctcggtttgtaggcctgataagacgcgccagcgtcgcatcaggctccgggtgccggatgcagcgtgaacgccttatccggcctacggctcggatttgtaggcctgataagacgcgccagcgtcgcatcaggcacaggatgcggcgtaaaatgccttatccggcattaaactcccaacaggacacactcatggcatataccacctttagtcagacgaaaaatgatcagctcaaagaaccgatgttctttggtcagccggtcaacgtggctcgctacgatcagcaaaaatatgacatcttcgaaaagctgatcgaaaagcagctctctttcttctggcgtccggaagaagttgacgtctcccgcgaccgtatagattaccaggcgctgccggagcacgaaaaacacatctttatcagcaacctgaaatatcagacgctgctggattccattcagggtcgtagcccgaacgtggcgctattgccgcttatttctattccggaactggaaacctgggtcgaaacctgggcgttcagtgaaacgattcattcccgttcctatactcatatcattcgtaatatcgttaacgatccgtctgttgtgtttgacgatatcgtcaccaacgagcagatccagaaacgtgcggaagggatctccagctattacgatgagctgatcgaaatgaccagctactggcatctgctgggcgaaggtacccacaccgttaacggtaaaactgtgaccgttagcctgcgcgagctgaagaaaaaactgtatctctgcctgatgagcgttaacgcgctggaagcgattcgtttctacgtcagctttgcttgttccttcgcatttgcagaacgcgaattgatggaaggcaacgccaaaattattcgcctgattgcccgcgacgaagccctgcacctgaccggcacccagcatatgctgaatctgctgcgcagcggcgcggacgatcctgagatggcggaaattgccgaagagtgtaagcaggagtgctatgacctgtttgttcaggcagctcaacaggagaaagactgggcggattatctgttccgcgacggtagcatgattggtctgaataaagacattctctgccagtacgttgaatacatcaccaatatccgtatgcaggcagtcggtttggatctgccgttccagacgcgctccaacccgatcccgtggatcaacacttggctggtgtctgataacgtgcaggttgctccgcaggaagtggaagtcagttcttatctggtcgggcagattgacagcgaagtggacaccgacgatttgagtaacttccagctctgatggcccgcgttaccctgcgcatcactggcacacaactgctgtgccaggatgaacacccttcccttctggcggcgctggaatcccacaatgtggcggttgagtaccagtgtcgcgaaggttactgcggctcctgtcgcacacgcctggttgcaggtcaagttgactggattgccgaaccgttagcctttattcagccgggggaaattttgccctgttgttgccgggcaaaaggcgatattgaaatcgagatgtgaattggttgtagtgccagatacaacgcttatgcgtcttatctggcctacaacgattacatggcgtagtaatacgctttcacctgctcccagtccgctttggggattggctccagatatttttccagctggcggaagtcatgattaatcgctttatcgcgacgcaagcggcgacgacttttctccaggtcaagaaaaccagcttctgcattaccttctgttttcacatagatatggcgaacataacaacagccatgctgacgattaatgctatgcattttcttaaacgccagcgccactgctttcaacatggcttgccgtacttcgtcagaataagggcttactgcatgctgggcataccagtcagcaatgctgatgaaccccgccatatcttcagtcaccagcaacgctcgccattcaccctcaattttcaccgcttcaccaaaaacgatcttcggcacgatgacaccggcccgttccagttctttaattaccgcaacctcacggacaatcgttggtcggccgaacggataacgtacggaatgaaacagatgatgcgtcatgcgctttacatacagctttttgccgttgcgctcgacgcattgcaccccgctcataccattacggcgatagttaggctcttcaacccagtcgccctctgttgcccaccagtgattaaattcgtcgtactttgcactaactgccataccctatcgcctgtcatttttattaacgacaatgactataggtggttacctgaggaaaatcttaatgaaacgtgtcgtattaatgaatttcttttgccactactagcttgacaccgcttttacccttcatttgcagcgcatagattccaccagccactaccactaatagtgcgcccagcagataaaatgtgaatttaatcaggcggatacagcgatgaattttattcgacagggattaggcatcgccttacaaccagagttaacgctgaaaagcattgcaggtgaattgtgttccgttcctctcgaaccaactttctatcgacagattagcttgctggctaaagaaaagccggtagaaggcagtccactgtttttactacaaatgtgcatggaacaattagtggcgattggaaaaatttgatatgagacaggatggcgcatgaacgccatcctgcagtaacattactctttattaagaaattttactgccttatcagggaaatcagtaaacagcccatttacacccgctttgttatacagagcatcatataactgattcacatcaggagtgtattcaggcagtttatcactccgcacggtataaggatgcactaccagtttattctgctgagcatcttgcaccatgccagtgagtttgatattacccggctggcttgtctcctcaatcaacatatggtaatccggaccaataccatctgcatattccgccacctgtttcatggcacccggcttaaacatccagtcgtagttgtaattaacccagcttccatccggctgtttctgctgcgtttcattccagtcggtataggcaatcagctgtaccagattgagctccatgcccattttgggttccagctcattcttaatacgcttcagctcatcagcatcaaaacattgcaaataaactttatcgtctttaccggtgtaaccatatttcttcagcacttccagcgtttttgccgcaatatccttcccttcctgatgatggaaccacggcgctttgatttctggataaataccgatatttttcccggtagagtgatttaacccctgaacaaattcaatctcttcttcaaaggtgtgcacccggaagtcggacttacccattgggaaacgccccggataagtctgcacttttttaccgttttcaatatcgaaaccttcggtaaatttcaagctcttaatttcatccagcgtgaaatctatcgcgtagtaacgaccgtctttgcgcgcccgatccgggaaacgatcggcaacatcagtaacacgatcgaggtaatggtcatgcagaacaaccagattgtcgtctttggtcatcaccaaatcctgttccagataatccgctccctgcgcatacgccatcgcttttgctggcagcgtatgctccggcaaatatccactggcaccgcgatgggcgatgactattttttcgttgctgtccgccgccattgcactgcttcccatgactatagtgctcatcatgatcgccatgctaaggtttttcagcgtcaatttcatgccattagcctccgttgcgttcttgcagtaattgttcatggcgacgtttttcgccaatcatcacaacaatcaacaagataaccgccagaatgctgccgccaatcattaccataaagccgccatcccagccgaagaagtccacggtgtagccaacaatcgcgctcgccgccacgctaccgcccaggtaaccaaacagcccggtaaagcccgctgccgtacctgccgcttttttcggtgccagttccagcgcatgcagaccgatcagcatcacaggaccgtagatcaggaagccgataacaatcatacaaatcatatcgacggttgggttacctgccgggttcatccagtaaacgatagtcgcgatggtcaccagtgtcataaagaaaacgccggttgccccacggttgccacggaagactttatcgttcatccagccgcacagcagagtgcccggaatacctgcatattcataaaggaagtaggcccaggaggatttatctagcgcgaaatgcttaacctctttcagataagtcggactccagtcgaggatgccgtaacgcagcagataaacgaacacgttggcgatggcgatataccacagcagtttgttcggcagtacgtactgcatgaagatttgcttcgccgtcagctcctgttccgctttttcgttatagtcgtccggataatcatttttgtactcttcgatcggcggcaagccacaggattgcggggtatcgcgcatcatcgcaaaggcgaataatgccaccagaatggcgcagaaagcaggcatatagagcgccgcatgccagtcattgaaccaggccatccccagcaggaacagcagcggcggaataccaccaccgacgttgtgcgcacagttccacacactcacaatgccgccacgttctttctggctccaccagtgcaccatagtacgaccacacggcggccaccccatcccctggaaccaaccgcagaggaacaacagtacaaacatcaccgcaatgctgctcgtcgcccatggcacaaagcccataaacaacatcactgccgccgccagaatcaaacctgcgggcaggaaaacgcgcggattgctgcgatcgcttacgctacccatgatgaatttgctaaatccataagcaatgctgatcccgctaagggcaaaacctaaatcaccgcgactgaatccctgctcaaccagataaggcatagcaagcgcaaagttcttacgaaccaaatagtaagccgcatagccaaagaatatccccaggaaaatttgccagcgcaatcgacgataagtcggatcgatctccgcggcaggtaagcgcgctttgtgtggcgctggtttaaaaatactcaacattgatagcctccgtggcccgtggtcttatttatgattaacagcctgattcagtgagagaacctgccgtttcttgagttgccgcgatgttaagaaaacattcataaattaaatgtgaattgccgcacacattattaaataagatttacaaaatgttcaaaatgacgcatgaaatcacgtttcactttcgaattatgagcgaatatgcgcgaaatcaaacaattcatgtttttactatggctaaatggtaaaaaacgaacttcagagggataacaatgaaaactcgcgacagccaaagtagtgacgtgattatcattggcggcggcgcaacgggagccgggattgcccgcgactgtgccctgcgcgggctgcgcgtgattttggttgagcgccacgacatcgcaaccggtgccaccgggcgtaaccacggcctgctgcacagcggtgcgcgctatgcggtaaccgatgcggaaagcgcccgcgaatgcattagtgaaaaccagatcctgaaacgcattgcacgtcactgcgttgaaccaaccaacggcctgtttatcaccctgccggaagatgacctctccttccaggccacttttattcgcgcctgcgaagaagcagggatcagcgcagaagctatagacccgcagcaagcgcgcattatcgaacctgccgttaacccggcactgattggcgcggtgaaagttccggatggcaccgttgatccatttcgtctgaccgcagcaaacatgctggatgccaaagaacacggtgccgttatccttaccgctcatgaagtcacggggctgattcgtgaaggcgcgacggtgtgcggtgttcgtgtacgtaaccatctcaccggcgaaactcaggcccttcatgcacctgtcgtggttaatgccgctgggatctgggggcaacacattgccgaatatgccgatctgcgcattcgcatgttcccggcgaaaggaagcctgctgatcatggatcaccgcattaaccagcatgtgatcaaccgctgccgtaaaccttccgacgccgatattctggtgcctggcgataccattagcctgattggtaccacctctttacgtattgattacaacgagattgacgataatcgagtgacggcagaagaggttgatattctgctgcgtgaaggggaaaaactggcccccgtgatggcgaaaacgcgcattttgcgggcctattctggcgtgcgcccgctggttgccagcgatgacgacccgagcggacgtaacgtcagccgtggcatcgtgctgctcgaccatgctgaacgcgatggtctggacggatttatcaccatcaccggtggcaaactgatgacctatcggctgatggctgaatgggctaccgacgcggtatgccgcaaactgggcaacacgcgcccctgtacgactgccgatctggcactgcctggtagtcaagaacccgctgaagttaccttgcgtaaagtcatctccctgcctgccccgctgcgcggttctgcggtttatcgtcatggcgatcgcacgcctgcctggctgagcgaaggccgtctgcaccgtagcctggtatgtgagtgcgaagcggtaactgcgggtgaagtgcagtacgcggtagaaaatttaaacgttaatagcctgctggatttacgccgtcgtacccgtgtggggatgggcacctgccagggcgaactctgcgcctgccgcgctgccggactgctgcaacgttttaacgtcacgacgtccgcgcaatctatcgagcaactttccaccttccttaacgaacgctggaaaggcgtgcaacccatcgcctggggagatgcactgcgcgaaagcgaatttacccgctgggtttatcagggattgtgtggtctggagaaggagcagaaagatgcgctttgatactgtcattatgggcggcggcctcgccggattactctgtggcctgcaactgcaaaaacacggcctgcgctgtgccattgtcactcgtggtcaaagcgcactgcatttcagttccggaagcctggatttgctgagccatctgccagatggtcaaccggtgacagacattcacagtggactggaatctttgcgtcagcaggcaccagcccatccttactcccttctcgagccacaacgcgtgctcgatctcgcttgccaggcgcaggcattaatcgctgaaagcggtgcgcaattgcagggcagcgtagaacttgctcaccagcgggttacgccgctcggcactctgcgctctacctggctaagtagcccagaagtccccgtctggccgctgcccgcgaagaaaatatgtgtagtgggaattagcggcctgatggattttcaggcgcaccttgcggcagctagcttgcgtgaactcggccttgccgttgaaaccgcagaaatagagctgccggaactggatgtgctgcgcaataacgccaccgaatttcgcgcggtgaatatcgcccgtttccttgataatgaagaaaactggccgctgttacttgatgcgcttattcctgtcgccaatacctgcgaaatgatcctgatgcccgcctgcttcggtctggccgatgacaaactgtggcgttggttgaatgaaaaactaccttgtagtctgatgcttttgccaacgctgccgccttccgtgctgggcattcgtctgcaaaaccagttacagcgccagtttgtgcgccagggtggcgtgtggatgccgggcgatgaagtgaaaaaagtgacctgtaaaaatggcgtagtgaacgaaatctggacccgcaatcacgccgatattccgctacgtccacgtttcgcggttctcgccagcggcagtttctttagtggcggactggtagcggaacgtaacggcattcgagagccgattctcggccttgatgtgctacaaaccgccacgcggggtgaatggtataagggagatttttttgcgccgcaaccgtggcagcagttcggtgtaaccactgatgagacgctacgcccgagtcaggcagggcaaaccattgaaaacctgtttgccatcggtagcgtgctgggcggatttgatcccatcgcccagggatgcggcggcggtgtttgtgccgtcagtgctttacatgccgctcaacagattgcccaacgcgcaggaggccaacaatgaatgacaccagcttcgaaaactgcattaagtgcaccgtctgcaccaccgcctgcccggtgagccgggtgaatcccggttatccagggccaaaacaagccgggccggatggcgagcgtctgcgtttgaaagatggcgcactgtatgacgaggcgctgaaatattgcatcaactgcaaacgttgtgaagtcgcctgcccgtccgatgtgaagattggcgatattatccagcgcgcgcgggcgaaatatgacaccacgcgcccgagcctgcgtaattttgtgttgagtcataccgacctgatgggtagcgtttccacgccgttcgcaccaatcgtcaacaccgctaccagcctgaaaccggtgcggcagctgcttgatgcggcgttaaaaatcgatcatcgccgcacgctaccgaaatactccttcggcacgttccgtcgctggtatcgcagcgtggcggctcagcaagcacaatataaagaccaggtcgctttctttcacggctgcttcgttaactacaaccatccgcagttaggtaaagatttaattaaagtgctcaacgcaatgggtaccggtgtacaactgctcagcaaagaaaaatgctgcggcgtaccgctaatcgccaacggctttaccgataaagcacgcaaacaggcaattacgaatgtagagagcatccgcgaagctgtgggagtaaaaggcattccggtgattgccacctccagtacctgtacatttgccctgcgcgacgaatacccggaagtgctgaatgtcgacaacaaaggcttgcgcgatcatatcgaactggcaacccgctggctgtggcgcaagctggacgaaggcaaaacgttaccgctgaaaccgctgccgctgaaagtggtttatcacactccgtgccatatggaaaaaatgggctggacgctctacaccctggagctgttgcgtaacatcccggggcttgagttaacggtgctggattcccagtgctgcggtattgcgggtacttacggtttcaaaaaagagaactaccccaccagtcaagccatcggcgcaccactgttccgccagatagaagaaagcggcgcagatctggtggtcaccgactgcgaaacctgtaaatggcagattgagatgtccacaagtcttcgctgcgaacatccgattacgctactggcccaggcgctggcttaaactcctttctgatgcccggtaagcatgtggttaccgggcatttttgcgtacacgattccgtgcccaatgtatgcgttgcaacgcagtgaaaattcctctgaaaacgtctcgcaaaggctgaaactggcagatgtcaaaggcctgggataaccgtaatgtcgcgtcatcataaatatcaggtgacggacaaccatgaccgaaagtacaacctcctccccgcatgatgcggtatttaaaacctttatgttcacacccgaaaccgcacgggattttctcgaaatacatttaccagaaccactgcgcaagctttgcaacctgcaaaccttacgcctggaacccactagttttattgaaaaaagtttacgcgcttactacagcgatgttttgtggtccgtggaaaccagcgacggtgacggctatatctactgcgtgattgaacatcaaagctctgcagaaaagaatatggcttttcggctaatgcgctatgccactgccgccatgcagcgtcaccaggacaaaggctatgacagagtcccgctggtggtgccgttgctgttttatcatggcgaaaccagcccttacccgtacagtctcaactggctggatgagtttgacgatccgcaacttgcccggcagttgtacaccgaagcttttctgttggtggatatcaccatcgtacctgacgatgagatcatgcaacatcggcgtatagctctgctggaactgattcaaaagcatattcgcgaccgcgatttaatcggcatggtcgacaggatcaccacgcttttggttagaggcttcactaatgacagccagctacaaacactgtttaattatctgctgcaatgcggcgatacctcccgtttcacccgttttattgaggagattgccgaacgtagtccactacaaaaggagagattaatgactattgctgaacggctacggcaggaagggcatcaaattggctggcaggaaggtatgcatgaacaagccattaaaattgctttgcgcatgctggagcagggctttgaacgtgagattgtgctggcgacaacccaactcactgatgctgatattccgaactgtcattaaaaggagagattaatgactattgctgaacggctgcggcaggaaggacatcaaattggctggcaggaaggtaaattagaaggtttgcatgaacaagccattaaaattgctttgcgcatgctggaacagggctttgatcgtgaccaggtgctcgcggccacccagctaagcgaagccgatctggcagcgaataaccactaattaacacaggcccacagccgatccccatgggcctttgatatcaataactaccttttatgcgtggcccatttttgccacttttaaacatcgccagtcgttgatccagggcatcgctgtagagcatcgtgtcaacgccaacagcgacaaagttcgctccccacgccaggcattgctgcgccatatcaggagccacagccagaaaaccagccgctttacccgcagcacggatccgccgaatactggtttcaataattcgctgcacttccgggtgcccggcgttatccgggtagcccaagctcgcagaaagatccgcaggtccaataaacacgccatcaatcccttcgacgtcgaggatttcgtccaggttatccagtgccgttttactttccacctgcaccaacagacaaaggctatcgttaacttgcgccatgtaattctcaatgcgtccccagcgcgcagcccgtgccacactggccccgacaccacgctcaccgtagggaggatagcgcgtggcagacaccacctgacgtgcctgttcggcagtatcgaccatcgggatcagtagagtttgcgcgccaatatccaggacttgtttaatcagcggtttactgccttccaccggacggatcacgggttggctggcatagggcgctaccgcctgtagctgatgataaagatcctgaatggtgtttggcgcgtgctccccgtcaatcagcaaccagtcataaccagaagtggcggcaatttctgccatataggcagtcgtactgcttaaccacagaccaatttgcacttcgcccttgcgtaaacgttctttaaagggattgcttaataatgcgttcatcgtgttccttaacctatttaatgatgtgccacgtcggtctgcgcaacagtgcgatttacacgcagagtgaaaataatcaggctaccgatgaccgccaccgctgccagcgtcagtaatcccgccgcatcgctggcaaataacgtttctgctttcacgcgcaggatcggggcaataaacccgcccactgcaccaaacaggtttacaaaaccaattcccgcagccagcgccgtaccggaaagcagttgtgtcggcatcgtccagaacactggctgcacggcaataaacccgatagctgcaacacacagcgctacgatcgccattactggagaaagcagcccggacagaccaataccaatgcccgccgccagtaatgtcagcgctgcgacattacgccgttcgccggttttatcggaatagcgcggaataagccaggtcccaaacaaggccgcaacccacggaatggcggtgaccacgctcgctgtaaagcccacttttgttcccagcaatgccgcaacctgggtcggcaggaagaaaattaatccgtaaaccgccacctgaatggtcaggtagataatcgctagttgccagactcggccattacgcagcgcatcgctcagccgagaagtcactttctgttgttcttcacttgccagttgattgataagcaacgttttttcttgtttactcagaaaacgtgcctgctccggtgtgtcatcaagccaaaagaatgtgaataccccagcaccgactgccaacaatccttcaatcacaaacatccagaaccagccgggatgccccataaatccatgcatctccaacagcgcgccggaaagcggacttcccagtgttaacgccagcggtgcgcccatatagaacagccccataatgctggcgcgattacgctgcggaaaccattggctggtgagataaatcataccagggaaaaatccggcctccgcagcacgaagcagagtgcgaactatcagaaatttcgcttcagtatcggcccatgccatggctgcgctaagaaatccccacagcagtgttgtcgtaccaatccaggttctggcccccagtttgcgcatcaaaagattcgccggaacacccagaaacgcatataccacaaagaaaatgcctgctcccagcgcataagcttcattactcaacccggtatcaatctggtaggtctgtttggcaaaaccgatattgctacggtcgagaaacgccagcacatacagcgccaacataaacggaattaaacgcacacggtttttcttcaccacggcgtcaagcaaagcggtgctcataaaaagctccttagaatatgtgggcgttaccgttgtcacagcaacgcccggagtgattagtggctgtaggggcgtttcaaattgcagtcatgattgagttcgacgccaaaaccgggtttatcaagcacacttttatgaatacgaccattcaccggaaccggctcattgagcagaatcgggtcaaactgcggacgcatcgtactacaatccgggctggtcatcaggaattcgctgaatggcgtattggtgaaggtgatcaccgcatggtgagagtaaacagagctaccgtgcggcaccaccagttgccccctggatttggcgattgcggcaatttccaccagcgtggttaaaccaccgcaccagccaacatccggctgcataatgtcgataccggtttcactaagcgtacgaaaagattgcagtgtgccgtggtgctcaccgctggtgaccatcattccgactggcgcgttgcgtttcagttcgcgataactttcatactgctgtggcggcaggcactcttcgatccatttcaggttatagggcgcgcaagcgtgggccagtttggtcgcatagttcacgtcctgactcatccagcagtcgagcattaaccagaaatcctcaccgcatttttcacgcatatccgcgaccatagcggcatctttgcggatccccgcatcgccatcatgtggcccccagtgcgtcggcattttgccaccgataaagcccatctcttttgccagatccggacgcgcacctgtggcgtagaactgaatctcatcacgaacagcgccgcctaaaagtttataaaccggaagcccgaccactttgccgaacagatcccacagagccagatcgacacaagaaatcgtattcatcaccaggccaccagagccggagtaatacagggtggcactgagcatttgatcgtggatcagtttgatatcactgacacatttaccctcaatgaaacggttaagatgtttttcgacaataaaacagcccatttcaccggctgtgctaacggcgaatccggtctggccgttttctgcttcgacttcaacaaccaacgtgccaagaacgttaatgccaaaactctggcgactctgctcgtaatcgcggtatttactcatcggggtggcaatatgatcgtctatccagtgattcgccccctggtcgtgataatcaccgccgccagcgcctttttctgctgtcgcaccgccagtaaaccaggcgcgaacctgtttaatttttggtagggtcatgatgttctccattgttaactggcttgtaagtcaaagggacttttccatcccaacagacgactaatatccctggcgcaggcaatggccttgcccgccagataatcacggtattcttcattgatttgtaagcgggtaccgaccacgctgatcgcagcggtaagctcgttattggcgttaaacaccggcgcagcgacacaacggacatcggcgtaatcttcgccgttgtcatagctccagccctgacggcgaatacgcgccagttcttcgtgaagttgctgtggatgagtaatcgttgtgggtgtcgcctgctcccagaccagcccttcgataatactttgctgtaccgctgcaggttgccaggcaagcaggcatttacctattccggagcgataaaggctaaggctttttccttcatgggaacgcacgctgatagtggcactactctccactttcaaaatgtaataagcgctgccgttatcaataatccccaggtgacataacagcccggtggtatccatcagttgcgtcaaacgcggtcgagccagttcccggagatccatcttgcttaacgcatgaccggaaagctccaccagcctggtccacaaacaaaaattttcctggtgatcaaggctaagaaaacgctgacgcctgagttcattaagcagcaaataggccgtgcttttagggattcccaatgtgtcaatgatcgtcgcagcactacaggggccaatgcgggcaatcaaattgagaatatcaatagcccgtgtcagggcgggaactttgctactttccaacatactggactccagtcttagatactggaatcagtctcgttgctcagggggagtaaaattgtgaagcgcatcaaatcccgctcctcgtccagcagactggagaaattacgcacaaatttgtgaatcagcgcacggattttttcttattgagtacaacaggttggacaaattttgccggagggggaatgtgccggtgcagtaaaccggcacagagtggcggaatcagacagataaggtcatggactcaacaacctcaatccagccatgctcactggcgatatcctggccgtttaaccaacggcgcagcatattcagtgccatcattgcgcacacttcctgacggatagccaggctgtagcgcgtagtgctgaaacgcacacgcagagcgaaagtgccgtctggcgtggctagcgcaaagttgagatgctcgttctcgaaaccgctaacagccagtgccagcccggcaaaatggttggcccgccgttctgtaatccagtgcgcagtttgcgccagggtttcctcctgactaggaaccacttcacacgccagcaatggagcacctgcgcgagaaagttgcaaagccaataaaccaccggtgaattgctcgctcaacgtcaggctgaactggcggttttgcaattcgcgactgatctgcgcgggcagtccttcagtgccttcgaaaatcacgctctgtccggcaacacgtttaacatccagccacagtttttccatcgcctgttgctcgcttgccggtccggtgagtttcagttcgatgataggcatactggagcgatagcccattgttacgcccggcggcagttgtagagtgtccaggctttgtgccagatcgctttcgctacgaccaaaagtagtcaaacgcagacaaaccggcggctgcggtaaagaaaaacgctcgcgcaggcgcggcaggatttcgtgctcgaccatcaccttaaattcactcggtacgccgggagtaaagaacatcaggcaacgattaagctgcacggcaaaaccacaggcggtgcctaccgggttattgataaattcagcactggcaggcagctccgcttgtttacggttgctcggtgccattactcgtccacgttcgtggaaatagcgttccatctctttgagccaggcttcatgcagcaccaggccttcaccttttgctgtcgcagcggcgagtgcgcttaaatcatcgctggtcggtcccagcccgccgttaacgatcagcacatcggcgtgctgactacgttcgcgaagaatggtgactaagtcatcaaggttatcccccaccgtattgcggcgagataatggcaacccctgatgaaagaaaaaatcggccagccaggcagcgttagtgtcaacgatttgcccgtgtaacacttcatccccggtggataacatttccacttttaacatggttatctcctgcttttgttatcgaatcactataacgcaaagggagataaggcgtagtaagaaactgaatggcgcgacagaatgccgcgccggaagggatcagaaactggcgttaaccccaacatacgggccgtcagccacggcgttgtcgcggttaccgtctttaccgctcagattcaggtagcgataacccgcctcaatactgactggacgcataatggtgtaacgcgcgccagcattcgcttcttcataactttgaataccgctggagaggctatccggagagtagtaatactcgccaaacaaacggaagctgttgccaattttccactgcaaaccacctcctaccgctgcggcataaccttcatcgccgtaattcgggttggtgtaaacgccttttccgccaacggtcgccattaacggcccgagaggcagattcaaccccagccccacgccagcgacatcaccgtcgtcgtcgttatgtgtccagttaccgcttaacgccaggcccgtcgtttcagtcccaaaaccgacaccaatattggtgtattctttacccgcctgaccgctgatgctcattgcattgacgcttgcagaaaccaacagcattccggccagacctgctagcgcaatttttttcattatcccctttcccacaagcaattaatcaaaattcccaaagctgcgggattgtactgcctggcacagaggattcaatgagcgaaaaaaaggatctagtcacttattgtaactaaatacttcttaaataattaaatgccgaaaaaataaacacactttatcgatacacacaaaaataataataagtacagttatcatcgcaaaagagattactgtcactttcacatatttgtgagttaccgtattctcatggtttctttttatttataaggaatatccctgtgcgacaacggactattgtatgccctttgattcaaaatgatggtgcttatttgctgtgtaaaatggccgacgatcgcggcgttttccccggtcaatgggcgattagcggtggcggcgtggagcctggcgaacgaattgaagaggcactacgccgcgaaattcgcgaagaactgggagaacagctgcttttgacagaaatcacgccgtggaccttcagcgatgatattcgcaccaagacgtatgcagatggtcgcaaggaagagatttatatgatttacctgatttttgactgcgtttctgccaaccgagaagtgaaaataaacgaagagtttcaggactacgcgtgggtaaaacctgaagatctggtgcattatgatttgaatgtcgccacccgaaaaacgttacgtttgaaaggtcttctgtaacaatgatgacagccattactggctgtcagattgaaaatttagtggttaacgaattccccatccagataaactttgcctttttccacatgcatgactaaaccatccagataatcaggtttaaatgtcgcgtcacgcttatctttagcaatatatgtcaggcaatgattatgggtgaaaataacgatatttttatcaggcgctttgctttgtaagtccttaattgcactataaatctcattaccgcactgaagaagtcgtttatctaccgtcaattttttacccgcactaaaccaggtagcgctctgaatggtccggacggtattactggaataaagatcgaaatcagggatatcagcactaaaagcgttgcccagttcacgggcatcctgggtacctttaaccgtaatacctgttttatcactcaagcattgattggtactacggtcgcaacgttcagcatgacgaaacaaaacgacaaccgggtgctgctgtgccagtctggccagtgttttattgtcgatacgtggcaaaccattgctactccaggcggcatgagtacccagtccggcaattgcagcgagcgccagtaaaatgatgatatattttttactcttcaagctagagcggcaaaaagctaacacgtaaactccacctatagacaagcgcaaccagacaattaccgtgaaattgagctacatttctggcgataattcgcagttggtgtaatattaaaaatcctacgatgtcggcaaaatgcctcaaaattttgccaaatgcaaagcctaaataagaaaaaatataaaaatttcaatatttacgtctaatattagtttcttaaggttaagttaatattctatccttaaaatttcgctccaaatggcaaaatatacacaacactctttatagcaaatataagtggacaggtattcaatggcggaaggaaaagcaatgagtgaatttttgccttttagccgaccagcaatgggcgtggaggaactcgctgcagttaaagaggttctcgaatccggttggatcacaaccggtccgaagaatcaggcgcttgagcaagctttttgccagttgacgggaaatcagcatgccatcgcggtcagtagtgccaccgccggaatgcatatcacgctaatggcgttgaaaattggcaagggcgatgaagtgattacgccttccctgacctgggttagtaccctcaatatgatttccttgttgggtgcaacgccggtaatggtggatgtcgaccgcgatacgctgatggtcacgcctgaagctatcgagagtgccattacgccacgcactaaagccatcattccggtgcattatgccggtgcgccagcagatattgacgccattcgcgccattggcgaacgttacggcatcgcagttatcgaagatgctgcccatgccgtcggtacgtattacaaagggcgacatattggcgcaaaaggtaccgctatttttagttttcatgccattaaaaatattacctgtgctgaaggtggcctgattgtaactgataatgaaaaccttgcccgccagctacggatgctgaaatttcacggtctgggtgtcgatgcctatgacagacaaacctggggccgtgcaccgcaggctgaagtcttaacaccgggctataagtacaatctgaccgatattaacgccgcgattgccctgacacagttagtcaaattagagcacctcaacacccgtcggcgcgaaattgcccagcaatatcagcaagcactggcagctctcccctttcagccattaagccttcccgcctggccgcacgttcacgcctggcatctgtttattattcgtgtcgatgaacaacgttgtggtatcagtcgcgatgcgttgatggaagcgttaaaagaaagaggcattggtaccgggttacatttccgcgccgctcacacacaaaaatattatcgcgagcgttttcccacgctgagcttaccgaataccgaatggaatagcgaacgcatctgttctttgccgctgttcccggatatgactaccgccgatgccgaccatgtcatcacagcccttcagcaactcgcaggacaataagccatgtttgaaatccaccctgttaagaaagtcagcgtggttattcccgtttataacgagcaggaaagcttaccggaattaatcaggcgcaccaccacagcctgtgaaagcttggggaaagagtatgagatcctgctgattgatgacggcagtagcgataattccgcgcatatgctggtcgaagccagtcaagcggagaacagccatattgtgtctattttgcttaaccgcaattacgggcaacatagtgcgattatggcgggattcagtcacgttactggcgacttaattattacccttgatgccgatctccagaatccgccagaagaaatcccccgcctggtggcaaaagccgatgaaggttacgacgtggtagggactgtacgccagaaccgccaggacagctggtttcgtaaaaccgctagcaagatgattaaccggcttattcagcgcaccactggcaaagcgatgggtgattacggttgtatgctgcgcgcctatcgccgtcatattgtcgatgcgatgttgcactgccatgaacgcagcacctttatcccgattctggcgaatatcttcgcccgccgtgccattgaaattccagtacatcatgccgagcgtgagtttggtgaatccaaatacagttttatgcgcctgattaatttgatgtacgacctggtgacctgccttaccacaacgccgctacgtatgctgagtctgctcggcagcattattgcgattggaggttttagcattgcggtgctgctggtgattttacgcctgaccttcggaccacaatgggcggcagaaggcgtctttatgctatttgccgtgctgtttacttttattggcgctcagtttatcggcatgggattactcggtgaatatatcggcaggatctacaccgatgtccgcgcccgcccccgctattttgttcagcaagttatccgtccatccagcaaggaaaatgaataatgaaaaccgtcgtttttgcctaccacgatatgggatgcctcggtattgaagccctgctggctgccggttacgaaattagcgccatttttacccatactgataatcccggtgaaaaagccttttatggtagcgtggctcgtctggcggcggaaagaggcattccggtttatgcgccggataacgttaatcatccgctgtgggtggaacgcattgcccaactgagcccagatgtgattttctctttttattatcgccatcttatttacgacgaaattttgcagctcgctcccgcaggtgcatttaatctgcatggtagcctgttaccaaaatatcgtggtcgcgcgccgctgaactgggtgctggtcaacggtgaaacggaaactggcgttacattgcaccgaatggtgaaacgtgccgatgccggggccattgtggcgcaactgcgcattgccattgcgccagacgatatcgctattacgctgcatcataaattgtgccatgccgcgcgccagctactggaacagacattacccgccattaaacacggtaatattctggaaatcgcccagcgcgaaaacgaagccacctgttttggtcgcagaacgccggatgacagtttccttgaatggcataaaccggcatccgtactgcacaacatggtacgtgccgttgccgatccgtggccgggtgccttcagctatgttggcaatcagaaattcaccgtctggagcagccgtgttcatcctcatgccagcaaagcacagccggggagcgtgatttctgttgcgccactgctgattgcctgtggcgatggcgcgctggaaatcgtcaccggacaggcgggcgacggcattactatgcagggcagccaattagcgcagacgctgggcctggtgcaaggtagtcgcttgaatagccagcctgcctgcaccgcccgacgccgtacccgggtactcatcctcggggtgaatggctttattggcaaccatctgacagaacgcctgctgcgcgaagatcattatgaagtttacggtctggatattggcagcgatgcgataagccgttttctgaatcatccgcattttcactttgttgaaggcgatatcagtattcattccgaatggattgagtatcatgtcaaaaaatgtgatgtcgtcttgccgctggtggcgatagccacgccgattgaatatacccgcaacccgctgcgcgtatttgaactcgattttgaagagaatctgcgcattatccgctactgcgtgaagtaccgtaagcgaatcatcttcccgagtactagtgaagtttatgggatgtgtagcgataaatacttcgatgaggaccattctaatttaatcgtcggcccggtgaataaaccacgctggatttatagcgtaagtaaacaattacttgatcgggtgatctgggcctatggcgaaaaagagggtttacagttcaccctcttccgcccgtttaactggatgggaccacgactggataaccttaatgcagcgcgaattggcagctcccgcgctattacgcaactcattctcaatctggtagaaggtagtccgattaagctgattgatggcggaaaacaaaaacgctgctttactgatattcgcgatggtatcgaggcgttataccgcattatcgaaaatgcgggaaatcgctgcgacggtgaaattatcaacattggcaatcctgagaacgaagcgagcattgaggaactgggcgagatgctgctggcgagcttcgaaaaacatccgctgcgccatcatttcccaccgtttgcgggctttcgcgttgtcgaaagtagcagctactacggcaaaggatatcaggacgtagagcatcgtaaaccgagcatccgcaatgcccaccgctgcctggactgggagccgaaaattgatatgcaggaaaccatcgacgaaacgctggatttcttcctgcgcaccgttgatcttacggataaaccaagttgacctaagatcttacggataaaccatcatgaccaaagtaggcttacgcattgatgtcgatacctttcgtggcacccgtgaaggcgtgccgcgtctgctggaaatcttgagtaagcataatattcaggccagcatttttttcagcgtcggcccggacaatatgggccgccatctctggcgactggtgaagccacagtttttgtggaagatgctgcgcagtaacgcggcaagcctttatggctgggatattttactggcaggtacggcctggccaggtaaagagattggtcatgccaatgccgatatcattcgtgaagcggctaaacatcacgaagtcggcctgcacgcctgggatcaccatgcctggcaagcccgtagcggtaactgggatcggcaaacaatgatcgacgatattgcacgcggtcttcgcactctggaagagattatcggtcaaccggtaacctgttctgccgctgcgggctggcgtgccgaccagaaggtgatcgaagcaaaagaagcgttccatttgcgctacaacagcgattgtcgtggggccatgccgttccgtccattgctcgaaagtggaaaccctggcactgcgcaaattccggtgaccttacccacctgggatgaagtgattggtcgggatgtgaaagcagaagattttaacggttggttactcaaccgcatcctgcgagataaaggcacgccggtttataccattcatgcagaagttgaaggctgcgcttatcagcataattttgtggatctcctcaaacgcgcagctcaggaaggcgtgacattttgccctttaagcgaactgttaagtgagacgttgccgctcggacaagttgttcgcggaaatattgccggacgtgaaggctggctgggttgccaacaaattgcgggtagtcgctgatgaaaagcgtacgttaccttatcggcctcttcgcgtttattgcctgctattacctgttaccgatcagcacgcgtctgctctggcaacccgatgaaacgcgttatgcggaaatcagtcgagaaatgctggcatccggcgactggattgtgccccatctgttagggctacgttatttcgaaaaacccattgccggatactggattaacagcattgggcaatggctatttggcgcgaataactttggtgtgcgggcaggcgttatctttgcgaccctgttaactgccgcgctggtgacctggtttactctgcgcttatggcgcgataaacgtctggctctactcgccacagtaatttatctcagtttgtttattgtctatgccatcggcacttatgccgtgctcgatccgtttattgcattctggctggtggcgggaatgtgcagcttctggctggcaatgcaggcacagacgtggaaaggcaaaagcgcaggatttttactgctgggaatcacctgcggcatgggggtgatgaccaaaggttttctcgcccttgccgtgccggtattaagcgtgctgccatgggtagcgacgcaaaaacgctggaaagatctctttatttacggctggctggcggttatcagttgcgtactgacggttctcccttggggactggcgatagcgcagcgggagcctaacttctggcactattttttctgggttgagcatattcaacgctttgcactggatgatgcccaacatagagctccgttctggtactacgtgccggtcatcattgccggtagcctgccgtggctgggattactccccggtgcactgtacacaggctggaaaaaccgcaagcattccgcaaccgtctatttgttgagctggacgataatgccgctgctgtttttctccgtcgctaaaggtaaattgcccacctatattctttcctgctttgcatctctggcaatgctgatggcgcattacgctttgctggcagcaaaaaataatcctctggcgctgcggattaatggctggattaacatcgcttttggcgtcactggcattattgccacatttgtggtctccccgtggggaccaatgaacacgccggtgtggcaaaccttcgagagctataaagtcttttgtgcctggagcatttttagcctatgggcatttttcggctggtacaccttaacaaacgtcgaaaagacctggccttttgccgcgctttgcccgctggggctggcgttgctggtaggatttagtattcctgacagagttatggaaggaaaacatccgcaattttttgtcgagatgacacaagaaagtcttcagccaagccgctatattcttactgatagcgtcggtgttgccgcaggtctggcatggagcctgcaacgcgatgacatcatcatgtatcgccagacaggtgagttgaaatacggccttaattatccggatgcgaaagggagatttgtcagcggtgatgagttcgcaaactggcttaatcaacatcgtcaggaggggattattactctcgtgcttagcgttgaccgcgatgaagatatcaacagtctcgccattccgcccgcagatgccatcgatcgtcaggagcgtctggtgctgattcagtatcgtcccaaatgatctggctaacattagtctttgccagcttgcttagcgttgccgggcagttgtgtcagaaacaggcaacctgctttgtggcgataaacaaacggcgcaaacatatcgtgctgtggctgggactggcgctggcttgtcttggtcttgccatggtgctctggctgctggtcttgcagaacgtaccggtaggcattgcttacccgatgttaagtctgaattttgtctgggtgacgctggctgcagtaaaactgtggcacgaaccggtaagcccgcgtcactggtgtggggtggcgttcattattggcggcattgtgaacctcgggagtacggtgtaatgggcctgatgtggggattattcagcgtcattattgccagtgttgcgcaattaagcctgggttttgcggcgagtcatctgccgccgatgacgcacttatgggattttatcgcggctctgttagcttttggcctggatgcccggatactgttactcgggctgctgggttatctgctttccgttttttgttggtataaaacgcttcataaacttgcgctaagcaaagcctatgccttgctcagtatgagttatgtgctggtatggattgctagtatggtacttcccggctgggaagggacttttagcctgaaagcactactgggagtagcctgtattatgagcgggttgatgctgattttcctgcccacgacaaaacaacgttactgagttttccctgccactttacactgccgttcccactcatcggggctataactgcttgcgctgaggactttcaccgtatgcagcttttcacgattaatacaataaagcgcattctgcaaagggctgagtaaatcccccactttcacggcgaagtcactcttcacttcggcgatcatttttatcgcgccgccagcatcgcagagcataagtacatgtctgttatcttgtttattgcagcagctttttttgaccagccattccattgcattatcctgtttgctaagagttttcacatcaatttacagattaacagataaactctttatcaacggcaatggaatggcagaaatgagaagtgaaacggagggttaattattgctgacgttgcacccactcttttagcgcctgacgactaattttaataccgccgtttttcagctccggcggcagagttagccagcgcaccggttgttgaaaacgggccagcttatctttcacccattcactaagatcaacgctctcgtggtcatactccatcaccgccaccggtcgatgaccaaactccttgtcggcaacggggacgataaacacctgcaaaaccgcaggatgtgcagcaattacgcgctcgacttcttccggctgaataccctctccgccactgaagaatagattgtctaaacgtccgacaatggtcagcttgccattatgcatctcaccgcgatcgcgcgtagcgtaccagccttcgtcattaaccagactaaccagttgcccgttacgccagtaaccttctgccatactggcagcccgcagccacacttcattattaacgattttcacttcccgacccggcagcgggctaccaacgtctgccaggccgtcggcttctttcgcacacaccgtggaggcaaactcggtcagaccatagccgcaaaagcaacgaatcccctgctcgcgcgcctgttccgtcaactcgaccgggatagccgcgccgccaagtaacaccgctttcagggaaacggaactacggttaaccagcaaacgccagagttgtgttggcaccagactagcgtgagtacagcctgccagcatttgctccaatggctgtttatcacgtaccgtcatccgcgcaccagcgtataaccagcgccacataattccctgaccggagacgtgaaacagcggtaaagagagcaaccaatcatcgtgatcgccaaacggaatcaggcttaacacaccttgcgcactggcaagatgggcctgataagtatggacagcggctttcggcaaaccggtagaaccgctggtcaacgtcatactgcacagacgcgtcggctgccacgtagcggcatgtgcgccttcaaccagctgaatgtgcaggctcgttaatgccggaaacgtgttttccccatccggcaccagagcaaattgcagcgtcagattgggcagcaattcttcaagcaacggttgcggcagctgagggttcacgggcaacacccgcgccccgcattgcagtaacgccagccaggcgagcagcgtttgcggcgtattccacgcccgcaacatcacgccgctgccctcaaccaccccctgcaccgcaaatccggaggctaattcatcgacgcgagcacaaagctcgcgccagttgagttgctcgtcattaagacgtaaggcgatggtttctccccgcacttgccgccagtgacgccacggccagtcagagaagatcataacaaccgctccagtgcatcaacttccacgacaggcagcgtgctacccggccagcgacgtacctgctgcgcctgcatcagatccagcgtgtccagccctggaatggtgtccggcgttaaccaggcggcaatccgcgccagttgcgttaagcctaagctgctttcaatggaagaactgatcaccgccgtcagccccagcgcgtgcgccgcctgtacctgctcgcgtactttttccagactgcccgtgagcgtgggtttgataactaccgcgcgcacgccctcttcagccacaaaggcaaaatccggctcgcgcaggctttcatcccaggcaatggcaatgccggtttcacgggcaaacgctcggctatcatcgcgggttttgcacggctcttcgagaaacgcgatgcggtcgcgataatccgggttaacgtatttggcaaactgctgacctttcagcggtgtccaggcgcgatttgcgtcaagacgcaaatgcagatccggaattgcctccagcaacagattcaccaccatgccgtcgcgcaccgcttcgtacaatcccactttgaccttcgccactttctcgcctggcatatctgcaagtttgaggatcagatcgtccggatcgccattacacagcggtgccgcacggtagttggctgcttgcggcaacgtatctgtcagttctgccaatgcacagcttacgccaaaggccacggaaggcatctgcggtagctcgcaatcgcctgccagccagttatttacccaggcaagcagcacactttgcgcctcttcccaggtttcctgactgaagcccggcagtggggagatctccccccacccttcgcgctcgccttcacgcaggcaaacatacagcccgtcgcgggtttttaaccgcctgtcgcgcagaaccacccccgcgtccatggggatctgccagcggtatacctgcgcgctacgcattacggattccgtttgaatttgctgaagtcaggctgacgtttctggttgaaggcgttgcgaccttcctgaccttcttccgtcatgtagaacagcatggtggcgttgcccgccagctcctgcagccccgcctgcccgtcacagtcggcgttcagtgcagctttcaggcagcgcagcgccatcgggctgttttgcagcatttcgcggcaccaacggacggtttctttttccagatccgccagcggtaccacggtgttcacaaggcccatatccagcgcctgttttgcgtcgtactgacggcacaggaaccagatttcacgcgcttttttctgcccgacgatgcgagccatgtaggaagcgccccagccgccgtcgaaggaaccgactttcgggccagtctgaccgaagatggcattatctgccgcgatagtcaggtcgcacatcatgtgcagaacgtgaccgccgccgatggagtagccagccaccatcgcgacaaccggtttcggacaggtacggatctgacgctggaagtccagcacattcaggtgatgtacgccggaatcatctttatagccgccgtaatcaccacgcactttctggtcaccaccggagcagaacgctttatcgcctgcaccagtcagaatgatcacgccgatgttgtcgtcataacgcgcatctgccagcgcctggatcatctcttttaccgtcagaggacggaaggcattgcgcacctgcggacgattaatggtgatttttgcgataccgtcggtggatttttcataacgaatgtcctcgaaaccttcggagcagtcgtgccattcaaccggtgcgtaaagcattgcttcatcaggataaatcatattgtgtcctttagtcagaaacgcaagatctgcgccagacttgcgattacgccagcgggattttcccgatgcgcgttatgtccggcgcgaggaatgacatggcagtcggcagccagttccgccgccagggcgcggaatttgctgtcacgttcaccacataaataataaaacgcaaatgtgcgggcgctaaggttagcacgtaaatcaggctggacggcgagagaagtcgcctccagcatggcggcaagcgttgcgccattattgttgctgcgcagcgccaccagctcccggcgttgatcgtcattgagactggcaaaaacaggctgttgataccagtcggcaaataccgccgttaacggttctgtgagaaaacgctgcacccattggcgatcggaacgctgacgttccgcacgttgttcagcattttgcagccccggatgcccgccttcgacaataaccccacaaagccccgccagcccctggcaagccgccatcatcgccacccgtccaccaaggctgtaccccaccagccagaagtcaaggatgttgtaactaaccaaggttttacgcagtaagtcggtgacatcatcaaatccatcgacgctaatcgccgcgctaccaccgtgacctgggagatcaacatacaaccgactgtagtcggcaaacgcctcgcccacttcttgccattcgtggcaatcgccggaaaaaccgtgcaaaaacaccagccagggtaaacctggttttccgtgttttgcctgcgcgtgcaggatcataaatggcttacctgcgccagaagttgctggagcgtttgcgcaccatcggtgtcgttaaccaccatttcaatcaccgtggtggttggcgtgcgccaggcgtcggcaaatgccgtttcaagttcctgccagttttgcggacgatgatatttcagctcgaacatcgcggcggcgtgctcaaaatggacgttttgcggcatcagatagaaacgctcacgctcgctttgcggcgttggcaacaggctgaaaatttgcccgccgttgttgttcaccacaattaataccagcggcgcagaaacctgacgcaataacgccagcgcgttgagatcgtaaagtgcggagagatcgcccacaatcgccagcgtcggtttgccgcttgcccgctgaacgccggcggcggtgctaagcagcccgtcgataccgctggccccacggttgctgtacaccgggtaacctgccggaagttggctaagcgcatcaatcagacgtaccaccaggctgttaccaacaaacaattgcccctgttcaggcagatagtcgcagatgcgatgcgccagttgcgcttcgccaaacgcatcacggcgggcaataaccgcctgcattgcctgttccgccaggcgcgggatttcaacgcaccagggctggcgtttttctgccggatgcagctccagccagtcggcaatattggcaattaagcgacgtccgcgatggtgtgccggatcaagtcgcccttcaatgtcatcaacaatccagtactcttctggttcacagcttgcctgccattgcaggagccgtttccccgtcaggctgcttcccagttgcaccacaatttgcgcctgctgcagctcgctggtcgctttggcattgcctaaccaaagatcggcacacggcagcggctgcccggtttgactcagcacatcgccaatcagcggccagccaagagtttgcgcccacagggcaacttttttgccctcttccgcactcatgcgcccggcaaccaccacgccgcgcttttgtcgccagaagaaccagtcgcgctgtttttcactttccagacgaggcgcttcacgcagccacggtttgtcttcctgccaccagtcacccagacgctgttgccagctaagcccggtatcgtccatttcgccatacagcggttcagcaaacgggcagttgatatggactccccccgcatgaagcgtaccgagagcgtggtcgatggtagaaaccagccaacgtgcggggatatcctgggtcgggcgcggcaaactaatactgtgcgtggggtgagaggcgaacattcccggctggcgaattgcctgattcgcgccgcagtcaattagctccggcgggcgatcggcggttaagagaatcagtttttctccggttaacccggcttcaatcagtgccggatagagatttgccaccgccgtgccggaggtcacaatcaccgccaccggctgcttgctgactttcgccagccccagcgccagatgccccaacccacgctcatcgaaatgggtgtggtgaatgaatgcggaattctccgccgccgctaacgttaacggtgtagaacggctgcctggggcgatacagatgtgtctgacgccgtgacgcgttaatgcttccagaatgaccgccgcccagcgtcggttaaatgcgcttacactcatgagtttgtccggtatcaatattgcggctaagtataaggagctacaaaaatagattattgatatgaatcggtaatgatgcgactcattattattccatttgtaataaagtacgcagccctgccgctttgttgtcgatttcctgccactcttgctcggggtcggaaccacggacaatgcccgcgccagcatataatcgcacgacattgccgctaatttttgcactgcgcagggaaacgcagaattcgctttgttgtaaactgagatagcccgcagaaccggcgtaccattctcgggtgaacggttcgtgacgggcgataaactgtcgcgccagatcgcgcggtaagccagcaactgctgccgttggctgcaactgatgtaaacagatcacatcatccgctttgttgagactagtccagatacagcggcgaagatgctgcactttacgcagacgcagtacctgcggcggtaaaacatccagcgtctgggtatcggcctgtaatcgttgacagatatcttccaccaccagcatgttctcgcgctggtttttatcatccgccatcagccactctcctaactgctgcgcctgcttatcatcaggattatttgctactgttcccgccagcgcttcagtacgcagcgctttgtcacgccgccgccataaccgttccggactagagccaagaaaagcattttcgccatcaaaggccatgtaaaaatggtagcaattcagattcagtcgacgactggcagccatcatcgccgccgcgttgaccggacttgcgaaatgcaggtcagttgcccgagcgagcaccactttgtcgagctcaccttcggcgatggttttcgttgccagttcgattaattgcgtccagcccgttttgtccggccagtgttgttctcgcgtggtggttaaatgtaacccaggcaagggcttgatactcaccagtgtggcgataaattcttttgcctgaatcgcatcgtgctgaagggagctttcgctgaatagcgtcagccgcagcgtggctttaccgccacagcgtcgccattccaggcggggtaaaagtaaattgccctggctcgggtcaaaagcattcagcccccaaatgcgtaagtcggcgtgttccgggtgctggcgaagaaaacgttgtgcctggtccaagctcgtaaaacgggtaatcgcgcccaggacgacagcttcttcatcaccattacgttgttgccagtagaattgcgggtatgtttgctgactggccagccagctcaaggcatcaaaagcgtctttgagagggaaaggaatatcgataacccgaatgccgggtgtcgccggaatctcttggctcaaatggcgcagtagattttccagcgccgtagtaagactttgcacgcggacctctccctgttaaaagcctcacattatacggggtactacaaaaaaaatgcagtaccccggtgtagggaggttttaacggcgtgccagcaacagtcctagtaccagcccaacggccgcgcccacaccaattccttgccagggtttttcgtggacgtagtcatcagcacgataaactgcctgcttcgcccgatagtaataactgtcactagcctggctaacccgttttttcacatcatccagcgctttttctgcacgcgctttcagctcaacatatttctgatcggcgggatcgccagaggagcggagcacctcttccagtgtttcactaagcagcgtcaggtcgtcatcgatacgtgtatcaccaaactgattagacattctcgttctccatttgcgtaaaacctgtcactaactatagacaagggttgttgattacgcctgaattacctcgcgtgccatcccaatgtgtgggataccatcttcttcatagacctccgtcacagggataaaaccgaaactctggtagaagttttgcagatgcgcctgcgccccgaggtaaacaggcttatcaggccagtgatgcgtacatgtttcgagtgttttactcatcagctgctgccccactttttcgccacgcaacgcttcactgacaatcacccgacctataacgaccggctcaagatcatcatcacttttcagaatcctcgcatacgccaccagttcatcatttttccaaccgagaatatggcgattatcccccgtcaaatcatcaccatcgatatcctgataagggcaattctgctcgacaacaaacaccgcgcaacgcagttgtaataaggcataaagctgggaaacgcttaattcagagtgatgcagatcttgccattcaatcataatgctctccttttagatgtatgccttatactagccggaatattttttgaaacgtgatgaactcatggaattaatttttttaggtactagtgccggtgtgccaacccgcacgcgcaatgtcacggcaatattgcttaacctgcaacatccgacccagagcggactttggttgtttgactgcggtgaaggcacccagcatcagctactgcataccgcctttaaccctggaaaactggacaagatttttatcagtcaccttcatggcgatcatctttttggtttacccggcttgctgtgcagtcgttctatgagtggcattatccaacccttaacgatttatggtccgcaaggtatccgtgaatttgtggaaaccgcgctgcggattagcggcagttggaccgattatccgctggaaattgtcgaaattggcgctggcgaaattctcgatgatggcctgcgcaaagtaaccgcttatccgctggaacacccactggaatgttatggctatcgtattgaagaacatgataaaccgggtgcattaaatgcccaggcattaaaagctgctggcgtgccgcctggcccactgtttcaggaattaaaagcgggcaaaacaatcacgctggaagatggaaggcagattaacggcgcagattacttagctgctccagtgccaggtaaagcgctcgctattttcggcgataccggcccctgcgatgccgcacttgacctggctaaaggtgtcgatgtcatggtgcacgaagcgacgctggatataaccatggaagccaaagccaatagtcgcggccatagctctacacgccaggctgcgacactagcccgtgaggctggagtcggcaagctaatcattacccacgtcagcagccgctatgatgacaaaggttgtcagcacctgttacgtgaatgcaggagtattttcccggcgactgaactggcgaatgatttcaccgtgtttaacgtttaactctgcttattattaaaaacagggcgaaacttgccctgttatcgcaacccgcgctacatatatccacccacacaggcatattgagcgatttttgatatttattcatctccttacgcactatattcagagcaataagttgcctcttttcatcttgattcagcacaacctttgcaactaaaaggagcccatgatggttacagttgtcagcaattattgtcaattatctcaaacgcaactcagtcagacatttgcagaaaaatttactgtgaccgaggaattactgcagtctttaaaaaaaacagcgttatccggagatgaagaaagcattgagttactgcataatattgcgttaggttatgataaatttgggaaagaagctgaagatattctttaccatattgttagaaccccaacaaatgagaccctaagcattatccgacttatcaaaaatgcttgtttaaaattatataatctggcacatatcgcaaccaactcccccctcaaaagtcatgatagtgatgatctcctgttcaaaaaactattctcccctagcaaattaatgacaattatcggtgatgaaattcctcttatatctgaaaaacagagccttagtaaggtgcttttaaatgatgagaataatgaactgagtgatggtacaaacttctgggataaaaatcgtcaattaaccacagatgaaatagcttgctatcttcagaagatcgccgctaatgcaaaaaatactcaagtcaattatcctactggtctctacgtcccctactccaccagaactcacctggaagacgctctcaatgaaaatattaagagcgatccaagttggccgaatgaagtccagttattccccataaatactggcggacactggatattagttagcctacagaaaatagtaaataaaaaaaataataaactacaaataaaatgcgtcatattcaacagtttgcgtgcactaggctatgataaagaaaatagtcttaagcgtgtcattaatagttttaattctgaactcatgggagaaatgagcaataataatataaaagttcatttaaatgaaccagagataatatttttacatgccgatcttcagcaatacttaagccaaagttgcggtgcatttgtgtgcatggcagcccaggaagtgattgaacaaagggaaagcaattctgacagcgccccctatacgttattaaaaaaccatgctgacagatttaaaaaatatagtgcagaagagcagtacgaaattgattttcaacatcgactggcaaacagaaattgttatttagataaatatggcgatgcaaatatcaatcattattatagaaacttagaaataaaacacagtcaacccaaaaatagagcatccggcaaaagagtgagttaacatcattgttaattaattcgaccagtcagcaaatatgctgactggtcgaacatagtttgctaaacagtcatcactgactgatgtcagtcacaccatccgccagttcaatcaggcgaataaattccgccctgtaaccctgtggatcttccccttttgcctgctgagcccactgtttgatctgctgccaggaggtattgttcaggtattcagaaccgcgtaacttttgcccatatgcagctactgctgcgcgaaaacgcatatcttcagagggcgcgtttattgttggccccagcgggaattcaactaactgactttcttttccctgcgggtatttccagcgaatttttaaccaggccagttctttcgttttgtcgcttttcgctaatttgttatccggggcatagcgtaacttatcaatacttgctttttgcccgttcagcgttaattcgaataacaacgttatatgtttgcctgcgcctatatcccctgcatcaacgttgtcgttattaaaatgttccacccgaagttggcgcttttcataaccaatctgacggtattccgttacccacgcggggttaaactcaatttgcgctttgacatcttttgctacggtaatcaacatctgccgcatttcactattcaatactttctgcgcttcagagagggtatcaatgtagctgtagttgccgttaccaacatcggcaattcgcaccatcattgcctcgttgtaattgctattccccacgccaaacgtgctcagagtaacaccagactcccgctgttttttgaccatactttcaatgctttttggatcgtcaatgccaacgttaaagtcaccgtcagtggctaataaaatgcgattgatgccgcccttaataaaccccttcgtcgcctgctgataagccagttccagcccggcaccgccattggtactgccttcggcatccaggctatcaattgcggcattaatttccgccttatgactcccggagatagaaggcaatgcaatacgggagtcgccagcgtaggtcacgatggcaatgttatcctgctcacgaagttctttgaccaataatttcaagctagactggataagtggcaaacgttcatcagaaatcatactaccagaagtgtcgataagaaagaccagattagaagctggtaactcttcacttttgcgatctttcgccaggatatcaactttcagcaatgttcgctgttcattccatggtgcaggtgccaattcgtagcgcatagcgaaaggtattggcttagaggccggaatagattgtttgtctttgatatcccaatcagacgggaaataattgactatctcctccacccgcacagcgtctggcggaggtaacagcccttgattgaggaaacgccttacattcgcataactgccagtgtcaacgtcaagactaaacgtcgccaacggattttgcgctacctgcttaaccggattatcatcgaactgctggtagcgagcggttcctggatttgcgatatgtgtagcttttgctttagccgctcttgcaaatgttggcgcttcctgcaatcgcccctgtaaagcctgtttgtcactatattgttgcacttcttgctgggccaaggctttcgcggcggcggcgctttgctcagcctcttttattgcagcttgctgcgcggcaagcacttgctgctctgtgggagtactgggttgttgttgctgactttccttattctcaggttgcggcccacatccactcaaaatcaaactactcataagcaacatgattatatttttatttcgcatataaaatccttttaaataaactcaggcaccagacataaaatatactctttgtataatcctgctaatcttaataaaatacaatatcgaaacccatagcaaataatgattcaacaacgcaacccattaataatttgcatatgaaaaaaataatctttgcttttattatattatttgtgtttttactccctatgattattttttaccaaccctgggtcaatgcattaccgagtacgccccgacacgcaagtcctgagcaattagaaaaaacagttcgttatcttacacaaactgtgcatccacgtagtgccgacaatattgataatctgaataggtccgcagaatatataaaagaggtctttgtcagtagcggtgccagagttaccagccaggacgtccccattacgggtggcccctacaaaaacattgttgctgattatggtcctgccgatggaccgctgattattattggtgcgcattatgactctgccagcagttatgaaaacgatcaattgacctatacgccgggcgcggatgataacgccagcggtgtggcaggattactcgaactggcacgtttgttacatcagcaagtaccgaaaacaggcgtgcagctggtcgcctatgcgagcgaagaaccgcccttctttcgtagcgatgaaatggggagcgcggtgcatgcagctagccttgagcgtccagtgaaattaatgatagcactggagatgattggctattacgactctgcgcctggaagccagaattacccttacccggcaatgtcctggctttatcccgatcggggagactttattgccgtggtcggcagaatacaggatatcaacgccgttcgtcaggtaaaagcggcattgttgagttctcaggatttatctgtttattctatgaataccccagggtttattcccggtattgatttctctgaccacctgaattattggcaacacgatattcccgccataatgattactgacaccgctttttatcgtaataaacaataccacttgcccggtgataccgcagacagattgaattatcagaaaatggctcaggtagtggatggtgttataactttgttatacaacagtaaataataaaaatttctcgaggcgggtccagaaaaagcgacatgcacattttattttccctcatctgttttaagatgcgaaacatgaaattcaacggaggaaaaataaatgggaatgattggctattttgcagaaattgacagtgaaaagattaaccaactgcttgagtctactgaaaaacctttgatggataatatacatgacacgcttagtggattacgccgactggatattgataaacgctgggattttttacactttgggctgacaggcacctctgcttttgatcccgcgaagaatgatccgctgagtcgtgccgtgcttggtgaacacagcctcgaagatggcatagatggcttccttggattgacctggaatcaggagttagccgcgacaatcgaccgactggaaagtctggatcgaaatgaactgcgtaaacagttttccattaagcgactcaatgaaatggagatttatccgggagtgacctttagtgaagagttagaggggcaactctttgccagcatcatgcttgatatggaaaagctgattagcgcgtatcgacgtatgctgcgacaagggaatcatgcgctgacggttattgttgggtgatatagcttgatgcctgggggagaaagacccattagttaagatttacgccaggatcatcttgaaaaaatctttaaccatggtccggtttttatccccttgtataaatattactaaatgcttgcttagtcgcattgttaaatgcaataccgtatattcggtatgtaacagcgatatcctctgtgctggcaacgatctgtcatgcttgatgaaaacggaattgaacctgtcattaccaggtagataaaaagcctgttcaattttgggattattttttataactcgtgtctgttatggcgacacgggaaaacatcaatattgtccttcacaaattgcagtaatatagaatcaacctctcttgcaagttggtcacaatgtattataagcattttgaatatgtcatcctctgtaatctcgtgaaaattttcggccttgtcttttagctcatcatatcggattcttgcagtaaccattttttgggcgagttctaataaccccaaagcttgcaattgctggtgagtatgatcactttcaaaaaatatcccacactccattccttcccaaccaacatattcatgccattcataaaccagcataaatgtttgtaaaactggcggtaataattggatatctgcaaaaccaaaccaaaacttacgcttgagatcccactcatattcaatcgccaatgctatattgtttaaggcatctccggcatccttatttttacgcaaaatcaattccgtcagtgtatagcgttgttcatcaatacgccgaagagcttctgcaatatcatagtttgtagccaacaaaacattctctgcttcctgatgagtgacgtctgcttttgccgtcaatatattgatttggtcaatatgaaacaacttgatggcttcatcaacatcaccgccagtcctctctaacaaacgtctggcaacctggataccgacaggtacgttcttccgaagtttacgaatttcacttaaccattccatgtcaaacccctttaaatatttatgatattaaatataacaacgtctggataacgacccggcctgactgaatatctcacgttttcctgcttaacattcatgttatgatgctcttgaaactaataatacgtatggaattgtcactatttatctgctaatgaatagtaacaatgtcattcgtttgatgaatatattatttcagggaataattatgacacctttagaacgcattacccaacttgttaatatcaatggtgatgttaataatcctgatactcctcgtccattgttatctcttgaggatttttttattgacaataatatccatggtagtatatgttgcaatgtgattccagaacaatctccgcaagctatctatcaccattttctgaaaatacgtgagcgtaacaatgttagtgatgttttggtagaaattacgatgttcgatgacccagactggccctttagtgaaagtattttagttatcaccactgctagtccagaagaagttcagagctggtttgtagaagaaattgcccctgatgagtgctgggaaggatggagtgaagatacggagcatggatgggttgaagtccctgtgggtatgcatccggttacttgttggtgggattaaaacatttatataaacagataagcggatgtttacataaatttttatgtgaaggaacatgatgaaacttattcctcgcagtagtgatattagtcctggcattgatggaatttgcccggggccttttcctccgaacggatttaccgtacttacagatgcagcatatggtaacggagactgtttcggtttgtactggcctattggtcaggagcataaactacctatagtgtgcgaaacgtaccatgacgaatggcgaatcgtacctgccttttccagcattaagaagttcgaagaatggctggaagtgaatgatgatgatccccatgaaaatggcatcagcatcgaagatcaagactttgcagcaaatctcttccgtgttgctcggaaatgtcttagtacgggaaggcttgatgacgcactgccactgttacagcgagcaacagaacaattgcctgaagtcagcgaatattggttagcactggcaatccagtatcgccgatgtaaaaaaacagaagctgcagcacaggctgcgcttaatgcttatcttggcaattgggcatttggtgttcctgacaataaagtcattcatttgctgagtcaggccgcagatgtcccgaatttccaggatgatcctgtgattcagtgcattaaagaacaaggattagatcttagctttggaggaacaaaggaaaataataattaccccttgatgcagatgtgtgttgatacttattttgcgcagagaaaaccgcttcaggcattaaccctgttacataattatgcctggataatgtccagtgaaacgactgcatttcaggaacgctatgattttaatatcgatgaatggcgggcaaaattcaggcagttatgtttagagtattttggcgatagtcgtacacagttcacttaacgctctgcgtctatctactatcccttctttttcagaaaaaccgccgagcatgtcggcggctttctgacttacaaagtaacagattacatcagcggcattgccaaacgcacaatgctaatcagcggttgtggccatacacccagcaccagtaccaacagtgcagagatcagcacaacgataccgcccgcgctgtactgccagttacttggtgcatcgcgacccggttgttccggggcgtgaagatacaggctcaccgccacgcgcaggtagtagtagaggccgattgcgctaccgacaaccacggcacccaccagccaccacaagtgtgcctggacaccgaccgccagcacgtagaacttaccgataaagcccagcgtcatcgggataccggccagagacagcatcatcaccgtcatcactgccgcgaggatcggacgatgccagaacagaccgcggtaagagaacagggaatcagcatccgggccacgatacgggctggacatcaggctgaccacgccgaacgcgccgaggctgctgaacagataaccggccaggtaaacccctaccgcttccatgctcatctcgccggtttgcagcgcaatcagcgctaccagcagatagccgaggtgagagatagaactgtaaccgagcagacgtttgatattggtctggctcagcgccatcaggttaccgaagatgatggaggcaaaggcgataatcgccagcaccacgcgaatcgcttcgctgtcacccaccggtgcgtagaggaacagacgcatcaccacaccgaagatagcgattttgctcgccgtcgccaggaaagtggaaaccggcgcaggcgcgccctggtatacgtctggcgtccacaggtggaacggcaccagagagagtttgaagccgaggccaacaatcatcaggccgaaacctgccagcaacagcggctcgttgagcataccgtcgccaaggtttttacccaacgcgacaaagctcaggtcgccagactgcgcatacaccagcgccataccaaacagcaggaaagaagacgctgcggcagaaaggatggtgtatttgatactggcttccagactacgtttctggcggaaagcgtaaccgaccaggccaaacagcggcaaagagatcagttcgataccgaggaacagagacgccagatggttggcattcgccagcaggatcccgcccagcgcggcaattaacaccaacaggtagaactcatccttgttgtcgttatagccttcaagccacgggtaggcgaaagtacaggtggcgaggctcgccaacaataccagcccggtgtaaagcatggcgaaaccatcaacgcgcatcagcggcgtaacgtccatagcgcccgcctggccaacaaaccagagcgaaaccagcgccgcgttaagcccaataaccgagagcgtagcgttgaggaaatgattgcgtcgccacgcaatggagagcatcacaaccaccaccgtcaagccgacgatcagcaacggtagcagtgcgatcaggttttgtggagttattgtcatggcgatttacggccttgtagtagtaacggaattaacaaaccactgctggatattgccaatcgcggagtggctggtatccagaatcggctgcggatagaagcccagcagtaccagcagcaccaccagcaacaggatcataaacagctcacgcaggctcatccctggcagttcctggctggcaatctggcttttcgctttaccgaagtaagcgcgatgtaacatcgccaggctataaacagatgcaaagaccagcccaaaggtagagataacggtaatcaccggtacaacctggaagctgccgaacagaatcataaattcgccgacgaagttaccggtgccaggcatcccaagcgttgccaccgcaaagaacaggctcagtgctggcagccatttcatcttgctccacagaccgcccatcatgcgcatgtcgcgggtatggatacgttcataaagctgaccacaaagaataaacagacccgccgcgctcaaaccgtgcgcaatcatctggattaccgcgccctggtaggccaactggctgccggtgtagatagcaatcagcacgaagcccatgtgggaaacgctggtgtaggcgatcagacgtttgatatcggtctgggcgaaggccatccacgcaccgtagaagatgccgataacacccagccacatagcaattggcgcgaactctgcgctcgcgttcgggaacagcggcagggagaaacgcagcaaaccgtaagcggcagttttcagcaagatccccgcgaggtcaacggaaccggcggtcggagcctgggagtgcgcatccggcagccagccatgcagcggaaccaccggcattttgactgcgaaggcgatgaagaagcccagcattaacaggtattccacaccactggacattggcgtattcagcagctcttcatagttgaaggtccagacgccggtcgcattgtagtgaacaaaaaccagcgccaggatggcaatcaacatcaccaggccactcgcctgggtgtaaatgaagaacttggttgccgccgtgatacgcgttttaccgtcagaggctttatgcccccacagtgcgatcaggaagtacatcggcaccagcatcatttcccagaagaagaagaacaggaacatgtcgatggcaaggaacacgccgataacgccgcccaggatccacatcaggttgaggtggaagaagccctgatatttttcgatctctttccagctacatagtaccgccagcacaccgagcagaccggtcagcacgaccatcagcaggctcagcccgtcaatggcgagatgaatagagataccaaaacgcgggatccacggcatgtcgaattcagactgccactgcggaattccggcggattgcgtcagactataaccgccctgcaaccacagttgcaggctcagcgccagcgtcaatcccatggtgatcagcgcgatccagcgtggcaccttgacgccaaagcgttcggtctgccagcacaggaagccgccaataaagggaattaatattagccagggtagtaacatggcgatctttattccttgtaaaagtcccgtcaggaccggattttcaacgaattctcacgacagaaaattctcttcggactgggggtagtgtcggatgcaccgcgaaggcggcttatccgacctacgttcttatatgcccaggggcaatcccacaatccttaactcaacgcagtaccatcaacagtgccagcaccacgaccgcaccgatgctcatggatgccacataccagcgcagatagccgttctcacttaacagcagacctttacctgcaaagcgggaaaggacagccgggatgttcatcatactgttcagcggatcgcgtttcagcaaccaggcaatacccaggaacggcttgacgaacactttgtcatacagccagtcaaatccccaggcgttgtaccaccaggtgcccagcagacggcccggcgcactgttggcgatggaggtcaccagagtacgtttacccagccacagccaggctgccagcagaatgccgaccaccgcgaccacgccagaggtaatttccagggtcaacatgctgccgtgcgccagttccgtcgtttgcggaagcacgccctgcagcggcggtacaatcagtgcgccaacgaaggtggaaaggatcagcagcacaatcagcggcaggctgtgagttacccctttcacggcgtgagcgtgaatttgttcttttccgtggaagacgatgaaaatcatacggaaggtgtagaggctggtcataaacgcaccgaccagacctgccaccatcagattgatatgaccattcgccatcgcacccgcgaggatctcatccttactgaagaagcccgcagtgaccagcggtagtgcgctcagtgctgcgccgcccaccaggaagcagagataaaccagcggaatagatttacgcagaccgcccatcttgaagatgttctgttcgtgatggcaggccagaatgacggaaccggatgccaggaacagcagcgctttaaagaacgcgtgggtcatcaagtggaaaatcgccgcatcccatgcctgcacgccaagcgcgaggaacatgtagccaatctggctcatggtagagtaagcgagaacacgtttgatgtcggtctgtaccagcgcggcaaaaccggccagcagcagcgtaaccgccccgacaatacccaccagatgcagaacttccggcgtcatcaggaacaggccgtgggtacgggcgatcaggtagacacccgcggttaccatggttgcggcgtggatcagcgcggagacaggcgtcgggcccgccatcgcgtcggcaagccatgtctgcaacggcaactgcgcagatttaccgaccgcaccgcccagcagcatcagcgtcgcccacatcagcatgttattgccgtcagcaaagtgcgctggtgccagttccaccatttcgcggaagttcagggtgcccagttcgttgtaaagaatgaacagtgcgaaagcgaggaacacgtcacccacacgggtcacgacgaacgctttcattgccgctgcgccattcttcggatcggtgtaatagaacccgatcagcagataggagcacaggcccacgccttcccagccgaggtacatcagcagcaggttgtcggcaagcaccagaaccaccatgctggcgatgaacaggttggtgtaagcgaagaagcgagagtagccctcttcaccgcgcatataccaggaggcgtacatgtgaataaggaaacccacaccagtgaccacgctgagcatggtcaggctcaggccgtccagcaccaggttaaaaccgatgttaaagtcgcctacgctcatccacgtccacagcggctggctgtatgtctgctcgccgttagcgaagaaatcaacgccgataaaggcggttaccagcgccgccaggcccacagagcctacgccgacgatcgcgctgacgttttcagaccagcgcccacgggagaatgccagcaggacgaagccaatcaatggcaaaataatggttaaggcaagcatgttcatccgcgcatctcacttacactatcgatgttcaggttctggcgacgacggtgaagttgcagcagcagcgcaaggccgatactcgcttctgccgccgcgaggctgatggcgagaatgtacatcacctgaccgtcggtctggccccagtagcttccggcgaccacgaaggccagcgcggaggcgttaatcatgatttccagaccaatcaacataaacagcagattgcgacggataaccagaccggttaagccaagaacgaataagattgccgcgaggatcagtccatgttgtaaggggatcatgcgtgctcctccgtttttcttttcgcgctgtcgtctttacgattgctcagcacttcacccgcacgctcttcacgaccgacgtggaaggccacaaccagacctgcgagcagtagcatagaagccagttccaccgccagtacgtaaggcccgaacagcgtaatacccactgctttagcactgattggcgtaccgtcgataccctgatcgttaacaccgaggatggcgtaaacaatcaccaccagcatgatggcgctcaaaattgccggaccaatccacacctgcggtttcagccactggcgttcctgttcgatttcactaccgcccaggttgagcatcatcaccacgaacacgaacagcaccataatggcacccgcgtagacgataatttccagcgcaccggcgaagtaagcgcccagactgaagaacaccccggaaatcgccagcaggctaataatcaggtacagcagtgcgtgtaccggattggtatgggtgatcactcgcaaggtcgcaagtatggctatcaggccacagatataaaaagcgaactccattgcccctctccttacggtaacaggctcttgacgtcgataggcttggcttcgttctctgcttcgcccttatctttgccgtcgattgccatacctgccatccggtagaagttatattccgggtatttgcccggaccggagatcagcagatcctctttctcgtaaaccagatcctggcgcttgtattcccccatttcgaaatccggggttaactgaatcgccgtggtcggacaggcttcttcgcacagaccacagaaaatgcagcgactgaagttgatgcggaaaaattccgggtaccagcgaccgtctttggtttctgctttttgcaggctgatacagccgaccgggcaggctaccgcgcagaggttacaggctacgcaacgctcttcgccgtccgggtcgcgggtcagaacgatacgaccacgataacggggcggcagatagaccggctcttccgggtacattcgcgtttcgcgtttggcgaacgcgtgcaggccgatcatccagatactacgaacctgggtgccgaaacctactaacaattcttttaaggtcatggtcttattgccccttattgcgcctgccagagaatgacagccgccgttaccagcaagttgatcagcgtcagcggcaggcagattttccagccgaaggacattacctggtcataacgcggacgcggtaagctcgcacgaatcaaaatgaacatcatcataaagaacgcggttttcagcgcgaaccagatgaatggcggtaacaacgggccttgccagccaccgaagaacagcgtcaccatcaatgcagagatggtcacaatcccgatgtactcacccacgaagaacagaccgaacttcataccggaatattcaatgtggtaaccatccgccagttcctgctcggcttccggctggtcaaacgggtgacggtgacataccgccacgcccgcgatggcaaaggtaataaaaccaaagaattgcgggataacgttccacacatgcgcctggctgttgacgatgtcggtcatgttgaaactaccggcctgcgccaccacgcccatcaaggaaagcccgaggaacacttcgtagctcagggtctgcgcagaagcacgcatcgcacccagcaagctgtatttgttgttactactccagcccgcaaacagcaccgcgtaaaccgccagacctgccatcatcaggaagaacaaaatcccgatgttcaggtcggcaaccacccaacccggactgactggcacaatcgcaaaggccagcagcaggctggtaaaggcaatcatcggtgccagggtaaagatgacgcgatcgctgaatttcgggatccagtcttctttaaagaacattttgatcatgtccgcaaccagctggaggctaccgccccagccaacacggttaggtccgtaacggttctggaacagacccagcaggcgacgttcgccaaagctcatgaatgccccgcaggtgacaaccaccagcaggatcaccaccgctttgaggatggtcagcaggatctcaatcagttccggacttatccaactcattgttgtgcctccttgagatcctcaagatgcgcgccagccagcaccggagcaatgccggacatacccatcggcaagcccacctgccctgccgtcagtccttcggcgatttcaaccggcagcgtgaccgtgttgccatcgtaactaaaggagacgcgtgtacctgcgttcacacccaacttcgcggcatccgctgggttgagtttgatgtacggctgcggcatacggctctggaagaccggagcacgctgactcaattcatcgctgccaaacaggtggtaatacggcgcgatacgccatttcccgtcctgcggctggaagcgtgccggtacgctggtgaagtaatccagaccattttcgctggtttcaaacagacgcacgcccggatcgccaaagcgcagtttgccgcccacttcgtcctggaatttgttccacgcctgcggggagttccagcccggcgcccaggcaaacggcacttggctacggtgcgcagtcggctggttgttaccttccatgctgaaggtgaacatggtgtcaatatcctgcggctgacgcggctcatgaacgctgatattggcgcgcatggcggtacgaccgctgtaacggtgcggttcacgggccagtttctgcccacgaatacggaatgtcgcatccggcgcagcatctttgatacctgccagttccgggattttcgccacaacagcgtcaatcacatggtcgagctgcgtccagtccacttcacggctcagcagggtgctgtgcaggctgtgtaaccagcgccagctttccagcatgacagttttgctgtcgtaataagcaggatcgtaaacctggaagaaacgttgggcgcggccttcgttgttgatcaccgtaccgtcgctttcagcaaagctggcagcagaaagtaccagatgggcgttttccataatcgctgtgcgttgatgatcaaccaccatcaccagcggtgctttagccagcgcagcattcacgcggatagcagaagcgtgacgatgcagatcgttttccaacaccaccaccgcgtcggcgcgtccggtttccagttcggttaacgcttcttcaaggctaccgccacccataatgcccagccccatgctgttgacggaacgggcaatcatggtgataccgacgtcagcgccgcgacctttcagggctttcgcgacgttagccgccgcctgaatcacctctaagctaccggcgttcgtcccggagataatcaacggtttcttcgcacctgccagtgcctgcacgatgacgtcgattttgctttgcagctcaggttcgataccgtcaaccgctggtgcagagttatccagcgcatgggcgatggcaaaacctaaacgcgcctgatcttcaaccggtgcgcggtaagtccacgccgcgatatcatccagacgggtgtcatcaacgttggtaacaaacagcggatgcttcgcacgttgaccgatgttgaggattgccgcaatctgccagtcagccactttctgtgctgccgccatttcgcgcgctttacctttcacagcctgacgcactgccagcgcgacgcgcgcgccggtctgggtaacgtcttcgcccagcaccagtaccgcatcgtaagattcgatttcgcgcagagccggagtataaatgccgccttcacgcagcactttcagcgccagttgcagacgttcctgctcaccgtgagcgataccggtgtagaagttttcttcgcccaccagttcacgcagcgcaaagttgctttccacgctggcacgcggagaaccaataccgatcactttcttgctctgacgcagaatatctgccgcgccctgcattgcctgttcggcgttgagggtaatgaaatcatcgccacgacgctgtactggctgacgcggacgatccttcaggttgacgtaaccgtaaccgaaacgaccacggtcgcagaggaagtagtggtttaccgtaccgttgtaacggttttcgatacgacgcagttcgccgtaacgttcaccggggctgatgttacagccgatggaacattgctggcagatgctcggcgcaaactgcatatcccatttacggttgtaacgctcggagtgcgttttgtcggtaaatacgccggtcgggcaaatttcgaccaggttaccggaaaattcgctttccagcgtgccgtcttccgggcgaccgaagtagacgttgtcgtgcgcaccgtaaacgcccagatctgtaccgtcagcgtaatctttgtagtaacgcacacagcggtagcaggcgatgcagcggttcatttcgtgagagatgaatggccccaaatcctgattacggtgggtacgtttggtgaaacggtagcgacggaagctgtgtccggtcatcacaatcatatcctgaagatggcagttaccgccctcttcacataccggacagtcgtgcgggtggttggtcatcaaccactcgaccacgctttcacggaactgtttcgcttcttcgtcgtcaatggaaataaaggtgccatcggaagccggtgtcatacaagacatcaccaggcgaccacgcgtgtcttccgcgttttggtattgcttcaccgcacactggcggcaagcaccgacacttcccagcgccggatgccagcaaaagtaaggaatatcaaggcccagagacagacaagcttccagcaggttgtccgctccgttgacctcgtattctttgccgtctacatgaattgtagccattagcatgcttccagttttctcagtcagagactgagcgttaatcgaaattcggttaccagcgctctttcagcaggttcggctgaatcccattaatcaaatgggtattgctgaacggctgtttgattcccgcctcaaattcttcgcggaaatatttgatggcgctctgtaacggctccactgcaccaggtgcgtgggcacagaaagttttacccgggcctaagaatcgacacagttgctcaagtgtttcgatatcgcccggctgaccttcaccacgctccagcgcacgcagaattttcacgctccacggcagaccgtcgcggcacggcgtacaccagccgcaggactcacgggcgaaaaactcttccaggttacgcaccaggctcaccatgttgatctcatggtcaaccgccatcgccagcgccgtacccagacggctgcccgctttaccgatactttcgaattccatcggcagatcaaggtgcgcttcggtcaggaagtcagtccccgcgccgcctggctgccaggctttaaatttcagaccatcacgcataccaccggcgtaatcttcgaggatctcgcgtgcggtggtgccgaacggcagttcccacagtcccggatttttcacccgaccggagaagcccatcagcttggtgccagcatctttacttttgctgatgttctgataccactccacgccgttagcgaggatcgccggaacgttacacagggtttcgacgttgttgacacaggtcggtttaccccatgcgccggaggttgccgggaagggtggcttgctgcgtgggttagcacgacgtccttccagggagttgattaacgctgtttcttccccgcagatgtagcgccctgccccggtatggacgaacagttcgaaatcgaaacctgttcccataatgtttttgccaagcagacccgcttcggtggcttcggcaatggcacggcgcagattaactgccgcttcgatatattcgccacgcaggaagatgtagccacggtaagctttcagcgcaaacgcggagatgagcataccttccaccagcaggtgcggcagttgctccatcaacaggcggtctttataggtgcccggctccatttcatcggcattacacagcaggtaacggatgttcatggattcgtctttcggcatcaggctccatttcaggccagtgctgaagcccgcgccgccgcgccctttcagaccagcgtcttttacctgattaacgatttcgtccggagacagcccggtcagcgccttacgcgcgccttcgtaaccgtttttgctgcggtattcgtccagccacactggctgtttgtcatcgcgcagacgccaggtcagcggatgcgtttcgggagtacggataatgtttttcatttataccgctccagcagttcagggatcgcttccggggtcagatgcgcgtgagtgtcctcatcgatcatcatgtttggccctttatcacagttccccaggcagcaagttggcagcagcgtaaagcggccatcaaatgtcgtttgccctggtttgatgttcagctttttctcgagcgccgcctgaataccctgataaccgttgatatgacagaccacgctgtcacaataacggatcacatggcgaccaaccggctggcggaagatctgactgtagaacgttgccacaccttcgacgtcgcttgccggaatacccagcacatcggcgatcgtgtggatcgcaccatccggcacccagccacgctgcttctgaacgattttcagcgcttcaatggacgccgcacgcgggtcttcgtagtggtgcatctcgtgctcgatcgcttcacgctctgccgcactcagctcaaaagcctcggtttgtggttgttgattctcgtgcataattagcggtccacatcactcataacaaaatcgatactgcccagataaacaatcaggtcagacaccaggctgccgcggatcgccgccggaatttgctgcaaatgcgcaaagctcggggtacgaacacgggtgcggtaactcatggtgctgccgtcgctggtcaggtagtaactgttgatccctttggtcgcctcaatcatctggaaagattcattggcaggcatcaccggaccccagctcacttgcaggaagtgggtgatcagggtttcgatatgttgcagcgtgcgctctttcggcggcggcgtggtcagcgggtgatccgctttgaacgggccttccggcatgttgttgaggcactgctcaagaatgcgcagactctggcgcagctcttccactttaagcattacgcgggtgtagcagtcagaaacgccaccacccaccgggatttcaaagtcgaagttttcatagccagaataaggacgcgccttacgcacgtcgaagtcgatcccggtagcacgcaggcccgcgccagtggtgccccactccagcgcctctttcgcgccataggcggcaacgccctgggaacgacctttcagaatggtgttttgcagcgccgctttctcgtaagacgccagacgtttcggcatccagtcgaggaactcacgcagcaggcgatcccagccgcgcggcaggtcgtgcgctacgccgccaatacggaaccacgccgggtgcatacggaaaccagtgattgcttccaccagatcgtaaattttctgacgatcggtaaaggcgaagaacactggcgtcattgcgccgacgtcctgaataaaggtgctgatatacagcaggtgactgttgatgcggaacagttcggagagcataacgcgaatgacgttaacgcgatccggcacggtgatcccggccagtttctctaccgccagcacgtaaggcatttcgttaacgcagccgccgaggtattcgatacggtcagtatacggaatgtagctgtgccaggactggcgttcgcccattttctccgcaccacggtggtggtaaccgatgtctggtacgcagtcgacaatctcttcgccatcgagttgcaaaacgatacggaaagccccgtgcgcgctcgggtggttcggaccgaggttgaggaacatgaagtcctcgttttcggtgccgcgcttcatcccccactcttccggtttgaaggtcagggcttccatctccagatcctgtttggctttggtcagctcaaacgggctgaattcggtagcgcgcgccggataatctttacgcagcgggtgacctttccaggtttgcggcatcatgatgcgtcgcaggttcgggtgaccgtcgaaagtaatgccaaacagatcccaggtttcacgctcataccagttagcgttcgggaacagtttggtgaaggtcggtacgtgcaggtcgttttctgccagcgccaccttcagcatgatgtcgcggttacgatcgatagaaatcagatggtagaaaacggaaaaatccgcggcaggtaacccttcgcggtgtgtgcgcagacgttcgtccatgccgtgtaagtcaaacagcatgacgtaaggtttcggcagtttctttaagaaatcgccaacttccagtaattgttcacgcttgatccacacaacgggaaccccggtgcgagtcgcctgaacagtaaaggcatccggcccaaaacggttgcgcagttcgccaatcaccggatcatcaagatgatcgcgggtctgccaggcgggttcttgcgcggttaagtcggtcatattgttcaccattgcaaatggtccgtggtgactgtcggcgcagtaagcttcgcgaaatagatttaggaataagcgaagaaaaatccctttgccgacaggcgcaaattaaatctcgtcaggtgtacgcaggttagttacggcaatgcgttcaccgcgcttgcgttcgcgctcactttgcatattggcgcgataaacgccctgatcgccaaccacccaggagagcggacgacgttctttgccgatagattcctgcaacagcatcagtgcctgcatgtacgcttcaggacgcggcgggcagcccgggatatacacatcaaccgggatgaatttatcgacgccctgcacaacggaataaatatcgtacataccaccagagttggcacaggcacccatactgataacccattttggttccagcatctggtcatacagacgctgaataaccggtgccattttggtaaagcaggttcctgcaaccaccatcaggtcagcctgacgcgggctagcacgcaatacttctgcgccaaaacgcgccacgtcatgcaccgcggtaaagctagtcaccatctcaacgtaacagcaggaaagaccgaagttatacggccaaatactgtttttacgaccccagttaaccatgtcattgagcttgcccataaacacgtttttgttaacttcttgctccagagggtcggttacgatctcctgcttttgcagggggtaacggtcgttctcaccgttgggatctatgcgggtgagcgtataatccatcttaatgcctcgcggttagcgttgacgattagcgatactgttcgtttccgggttcatacgctcgcggcgactacgcgcgggcgtccagtccagcgcgccaatacgcaccagataaaccagacctgccagtaacacaaaaataaaaattgcagcttccacaaagcctacccagccgctttcgcggatagaggtactccatgcgaacagatacagcgcttcaacgtcgaagataacgaagaacatggccaccagataaaacttggcggacaggcgtaagcgggcggagccgacgctgtcgataccggattcaaacggcacgtttttgctcctcgcgcgtgcgcgaccgcctaaaaaccaaccgcctaccagcatcaggcaacacaggccaatggcaacgataagaaagatagcgaatgcccagtgatgagcgatgacttcagtggatgtactcatactcattgcttactcatcaaaagtagcgccagattcactgctcttcacggcagatggacgccacatcgattcatggggaggaataaaaaaaaccttacaatcactgtagaaattcttttatacagctaattgatgtggttttttactcctttctataaccttttgtcaactttaacaaaagtttcttcacattagtttacataatatcaacaccattagcatttaatgccctttcaccccagatccttgacgactccaggataattagatgttgttgaatcgtgtccgttgtgaagcaatggaaaaaatacgggtctattttgacaggaatttgtgtcgattcctccccccaaaagagagtattttcttgatctgtgacacgcttttgtcattccataacaaaaacgcagcaacaaatttacgtattttttaacatcattgtagcaggtgatttttttcaggcgattatttgtgcgttcgggacgtgaatctctggtggttgaaaaatgaacagttttgtacgttctgcactatgcgatgaaggatttttactaaaaaaaagccgctggggtttaaaacacccccagcggctcgttttttacactattgtctcaggaattatctatcgtccgtcgattactcgatatccctttcaatcaacaaactatcatccccttccggagcagacattgggctgtattgccacggattatggtagctctccatcgcctgatagatcacctgggccagctcattattactggacggatcatagcacagcaaatattcggtatcaggtagcggcggtaagccatctactccactcagcacacgcaggtccgggctcatcatctcaaccggccttgccgtcacgccaagaccggctttcactgccgcacgaacggccggaagcgtgctggcgacataagccagtcgccatggaatatctgctttattaagcgtcgccagcaccatatcgcgaaacgggctaggatcatccagcaatacaagagggatcggctcgcctttttgcaatatgtattccgctgcgcagtaccagtgtgttgggctggtacgcaggttcaatgccttaaacgcactaggacgatgggtggttaccatcaaatccacttcctgggattccagcatttctgccatataggcattacgtttaacgcggacatccagcgctaatttcggataaacgctactcacgcgatttaacaggaaaggtaagatcgtatcggcagattcatcactagcaccgatagttaatacgccctgaagattactgaacattaaactactgcaggcctcatcattaaaacgcaggattttcctggcgtaaccaagaagttgaatgccatgttcagttaacagtttgttgcgaccgtgacgagcgaacagttctttcccaacgagttgttccagacgctgcatttgctgacttacggcggactgagtacgacacacagcggcagctgcggcagcaaaagtgttcagatcggcaacagcaacaaatgttctcagcagatcgaggtcgaggttaattatcggacgatttgcacttatcatatattatcacttactggcggctcatactgagctggttaatgctgtgcacacacaaacaagcaattccatttgtaatgtgcctccctggcagtttcatccggaacccggacgaaagtaaaaatgcatatgagttgcactaaaaaagcgactcacattgttccgttataatgcctgaagtagatcacagaatatatcttcagggatcgcatatctattaagttactcactcttttctatttatgacatgcgcgtgtttgtataaatgtaaatgtgagtccttgttccactctcgtgcagcatcgctggtcatacgcgaacacgtaccaacagcaatggtgaggcggcatcaagagcagggatccgtcatttatccgagcattttaccccaaaaaccttttatttataagggtcattgcgaattatctgatgcaaagttatgttatgttaggcaaagtaatcttctattattaataagcacatcaaaacctttttgaatattaaataataattaattagcatcatcctcattcattaattccgcttaacaatagtttcacaccttgcccccattgcgacacctcggaaatcatcacgcagttaaactctccgtaatgaggaaatatcatcatcgcgtttcattagtgaattcttaaatgaggcattttcacacaattatcttacagataaaaaaaccagacttacaattaagaatcagaacaattcactatataacattgcatgtaaagcatatacacctcattattttgtcattattaagttattaacagcacaatcgagccttcccctctggcaaaatcttattctgcagaccttcaaaacaccgtcctgggggagtacattgttctaagctgacttccacggcagggagtggcgataacagcaaaaaaggtcaagattcatgtcccccattgaaaaatccagcaaattagagaatgtctgttatgacatccgtggtccggtgctgaaagaagcaaaacgcctggaagaagaaggtaacaaggtactgaaactgaacatcggcaacccagccccgttcggttttgacgcgccagatgaaatcctcgttgacgtgatacgcaacctgcctaccgctcaagggtattgcgattccaaaggtctttactccgcgcgtaaagccatcatgcagcactaccaggctcgtggcatgcgtgatgttaccgtggaagatatttacatcggcaatggtgtaagcgagcttatcgttcaggcaatgcaggcattgctgaacagcggggacgaaatgttggttcctgcaccagattacccactctggaccgcggcggttagcctttccagcggtaaagcggtgcattatctttgcgatgaatcctctgactggttcccggacctcgatgatattcgcgctaaaattacgcctcgtacgcgtgggatcgttattatcaacccaaataacccaaccggcgcggtatattccaaagagcttttaatggagattgtggagattgcacgtcagcataatctcattatcttcgccgatgaaatttatgacaaaattctctacgacgacgctgagcatcacagtattgcgccgctggcacctgacctgctgaccattacctttaacggactgagcaaaacgtaccgcgttgcaggcttccgtcaggggtggatggtgttgaacgggccgaaaaaacacgccaaaggctacatcgaaggtctggaaatgctggctagtatgcgcctgtgtgctaacgttcctgcgcaacacgccattcagaccgcgctaggtggttatcagagcatcagtgaatttattacccctggcggtcgtctttatgagcagcgtaaccgcgcgtgggaactgatcaacgatattccgggcgtttcctgcgtgaaacctcgtggtgcgctgtatatgttcccgaaaatcgacgccaaacgctttaacattcacgacgatcagaaaatggtgttggatttcctgttgcaggaaaaagttctgttggtgcaagggacggcattcaactggccgtggccggatcacttccgcattgtcacgctaccgcgtgtcgatgatatcgagctgtctttgagcaagttcgcgcgtttcctttctggttatcatcagctgtaatcttaatttcactgccggagattgcatccggcagcgttatcccgccacaatgacctgatgatgtcatcatacgtaaggtcactatgaaacagagccatttttttgcccatctctcccgcctgaaactcattaaccgctggccgctcatgcgcaacgtgcggacggaaaatgtgtccgaacacagtttgcaggtagcgatggtcgcccatgcgctggcagctatcaaaaatcgaaaatttggcggtaatgtcaacgccgaacgtatcgctttactggcgatgtaccacgatgccagtgaagtgctcaccggcgatctccctactccggtgaaatacttcaatagccaaatcgctcaggagtacaaggctattgaaaaaatcgctcagcaaaaactggtcgatatggttccggaagagctgcgggatatctttgcgccgttaattgacgagcatgcatatagcgatgaagaaaaaagcctggtgaaacaggcagatgcactgtgtgcatatctgaaatgtctggaagaactcgcggccggaaataatgaattcttgctggcaaaaacgcgactggaagcgacgcttgaagcgcgtcgcagccaggagatggactacttcatggaaatatttgttcccagcttccatcttagcctcgatgagattagccaggatagtccgctgtaagcagccggagtctgcgtcgcatcaggcaataagcgccggatgcgacatcaggctcttgtcaaaacggaaacagcatcgggatcatcaccacacaaaccgccatcacgataatggtgaacggtacccccaacttcacaaagtcactgaagctgtaatttcccggacctaaaaccagtgtgttaacaggactagaaaccggtgtcataaaggcggcggatgctgccatcgccacgaccatcgcgaatggataagggctcacccccatcgttttggcagcagccagcgcaatcggagccatcaacaccgccgtcgcggtattagagataaatagcccaataaccgcgctcaagacaaacaaacaccccagcatcatatgtggcccgtaaccaccgccaatgtccatcagccctttcaccgccagcgcgacacctcccgttttctgtaatgccacagcaaacggcatcatcccaacgatcaaaataatgctcggccagtgaatggatttataggcgctttcagcatctatacagcggaatttccccatcagcaggcaggcgatgatagcggcaacaggattaggaatttcatctgtcagcattaacgccaccattagcaccagacagaaaatggcatggggtgcctggctgtgcgcgggacttgcttcactcacctcttccggtaagttcagcgctacgaagtcgcggccctgtttggccagcataccgatcagtttccagttacccacaaccaggatgatatcgcccagcagcagaggctcatccgccaggctaccttccagcgccacgccattgcgctttagccccaccacattcagtccgtagcgggtacgaaaaccaatttcgcgcacgcttttaccaatcagttcactctcaggaattaaactaatctctgccatgcccacatcaagggcctggtcagaaaatactcgccgcgcagtaccatcggctccagcaattgctcactacaaaattgccggagatcgacatcagccgcagacatatcaataagcaaaacgtcacgcgcgcgaaattcagaaaccccattaacgttcacgataacgcgacgaaaacgccgccagcgttcaacaccgatgacgttagcgccataacgctcacgtaatttgagatcatccagccgttgaccaatcattgggcttccggggcgaatagccagacgtcgcgcacgcccggtcagtcgatattcacggataagatcgcgaaaggttcgacgcgtccagccttcgcgctgcggggtctgggtatcccctttcagcatgaaacgcatcactaacatatacaaaatacccagcaccagcacgaccaggccaataggtgttacgctaaagaaactgaagccgtgatagccttcacgcagcaattcactgttgactaccaggttcggcggcgtcgccaccagcgtcatcatgccgctaatcagcccggcaaaacttaacggcatcatcagacgactcgggctcgtttgcatacgcatggcaacgcttaacaccacgggaataaagatagcgacaacgccggtactactcataaacgcgccaagccccgcgacggtcagcatcaacaaaaccaacattttgatttcactattgcccgcaactttgaccagccatgttcccattacggtggcaacaccggtacggaccaaaccatcgccaataataaacaaggcggcaatcaggacaacgttaggatcagaaaagccggaaaatacttctgggactgtcagcgttccgcttaatgcaaacgcgacaataacaaacaaagcgaccgcatccatacgcactctgcccgtcgcaaacaagacgatggcaacggccagtaaactaagaacccaaatcaattcaccgttcacaacttatccttgttaattgagggggatgacttgattctgccataaaaaagccccgacgagacggggctaaatcatgatcaggtgtttcactgaataataacatcgccatttggctgtttggtcacagtaatttgctccagactgtggaggaccaaatcgacctcattcaggcgcggggtatctgccggagcgttaaccgcaatgacatgacaacccgccgccaggccagaaagcacgccagcgggagcatcttccaccaccacacactcctgcggcgcaagccccagcagctgcgcgcctaacagatacgcatcaggttctggttttccgcgcttcactcgctcagcggttacaaacacctctggtgcgggaagcccagctattttatggcgcgctcgcgctaccggcatggagccagaagtcacaatggcccacggaatacctgctttattcaaatgactgagtaaggcgattgcccccggaagcgcggtaataccttcggtttccgtggcctcgatgtgctccagacgcgtaaactcggcggcaatatcagcctcggatttgcccgccataaaatggcgcagagaggtgatcgcctgtttaccgtgaatgaaagccagcacctcttccggcgctaacccatgacgtctggcccagttgctccacgcccgttctaccgcaggcagggaatccaccagcgttccatcaagatcaaacagaaaacctttgcaccgcacgcgggcctcctcaggcattgataatttgattaatttcgttggcgctcaaatggtactgacgcgggcaggcatgccacacattaagcatgcgctgatatttttcccacattggcgtctgggcgttaaaaccgtgagttccggcgtcaaaatgggtatagcgcccttccacattaaccataaagcggacataaccgaggtaacgtgcttcagtggcggcgtcaaagccgaggaaggtgacacgacgttcatcgatggattgctggtcctgcaaattagaccaggaaacatgcaacgcatgatacatctccataatgtcgatgatagtgcggcaggtttcttctttcagctcgccaaactcgcgatccaattcacgcatctgtaatccgtaaccacgctcaataattgtttgcaggcgacggtaacgttcagcatttgccggatcgagcatagtcatcatcttgtactgattagacaaaataagacgttgcgcgttggtcatttccattgttgactcctgtatcactctactacggtgaaaaaaaagaaggctgagtatgccttcttttatatgcgtaatcaggggtcaattacaaatcatcaaggaaagttttatccagttgtttgaaggcgcgcttaagcgtgtcagctaatgcctggtaatcaggcttgccttcaacgggtgccaacacctgtccagactcctgcaatttaccgcgaacttcataaaaccagttaaggattgcagggggtaatggcgtgacagaacgcttgcccagccaccacaatccctgcatgggtaaacttaaggcgaacagggcagtggcaactgccggcccaagctgaccgcccagggcaatctgccagcagagagtaaatacggcgatcggcggcataaaacggatcgcataacgcgtcatcttgataacgcgattttcgacaaagaccggggcaaggcgtttttccagcggccacgtcttactgtaatgctgtccccggcgaaacaagctaaaaaaattaacagaacgattatccggcgtactcatgcttcacctcaacttcacatataaagattcaaaaatttgtgcaaattcacaactcagcgggacaacgttcaaaacattttgtcttccatacccactatcaggtatcctttagcagcctgaaggcctaagtagtacatattcattgagtcgtcaaattcatatacattatgccattggctgaaaattacgcaaaatggcatagactcaagatatttcttccatcatgcaaaaaaaatttgcagtgcatgatgttaatcataaatgtcggtgtcatcatgcgctacgctctatggctccctgacgtttttttagccacgtatcaattataggtacttccatgagcagtaagttagtactggttctgaactgcggtagttctagtctgaaatttgccatcatcgatgcagtaaatggtgaagagtacctttctggtttagccgaatgtttccacctgcccgaagcacgtatcaaatggaaaatggacggcaataaacaggaagcggctttaggtgcaggcgccgctcacagcgaagcgctcaactttatcgttaatactattctggcacaaaaaccagaactgtctgcgcagctgactgctatcggtcaccgtatcgtacacggcggcgaaaagtataccagctccgtagtgatcgatgagtctgttattcagggtatcaaagatgcagcttcttttgcaccgctgcacaacccggctcacctgatcggtatcgaagaagctctgaaatctttcccacagctgaaagacaaaaacgttgctgtatttgacaccgcgttccaccagactatgccggaagagtcttacctctacgccctgccttacaacctgtacaaagagcacggcatccgtcgttacggcgcgcacggcaccagccacttctatgtaacccaggaagcggcaaaaatgctgaacaaaccggtagaagaactgaacatcatcacctgccacctgggcaacggtggttccgtttctgctatccgcaacggtaaatgcgttgacacctctatgggcctgaccccgctggaaggtctggtcatgggtacccgttctggtgatatcgatccggcgatcatcttccacctgcacgacaccctgggcatgagcgttgacgcaatcaacaaactgctgaccaaagagtctggcctgctgggtctgaccgaagtgaccagcgactgccgctatgttgaagacaactacgcgacgaaagaagacgcgaagcgcgcaatggacgtttactgccaccgcctggcgaaatacatcggtgcctacactgcgctgatggatggtcgtctggacgctgttgtattcactggtggtatcggtgaaaatgccgcaatggttcgtgaactgtctctgggcaaactgggcgtgctgggctttgaagttgatcatgaacgcaacctggctgcacgtttcggcaaatctggtttcatcaacaaagaaggtacccgtcctgcggtggttatcccaaccaacgaagaactggttatcgcgcaagacgcgagccgcctgactgcctgatttcacaccgccagctcagctggcggtgctgttttgtaacccgccaaatcggcggtaacgaaagaggataaaccgtgtcccgtattattatgctgatccctaccggaaccagcgtcggtctgaccagcgtcagccttggcgtgatccgtgcaatggaacgcaaaggcgttcgtctgagcgttttcaaacctatcgctcagccgcgtaccggtggcgatgcgcccgatcagactacgactatcgtgcgtgcgaactcttccaccacgacggccgctgaaccgctgaaaatgagctacgttgaaggtctgctttccagcaatcagaaagatgtgctgatggaagagatcgtcgcaaactaccacgctaacaccaaagacgctgaagtcgttctggttgaaggtctggtcccgacacgtaagcaccagtttgcccagtctctgaactacgaaatcgctaaaacgctgaatgcggaaatcgtcttcgttatgtctcagggcactgacaccccggaacagctgaaagagcgtatcgaactgacccgcaacagcttcggcggtgccaaaaacaccaacatcaccggcgttatcgttaacaaactgaacgcaccggttgatgaacagggtcgtactcgcccggatctgtccgagattttcgacgactcttccaaagctaaagtaaacaatgttgatccggcgaagctgcaagaatccagcccgctgccggttctcggcgctgtgccgtggagctttgacctgatcgcgactcgtgcgatcgatatggctcgccacctgaatgcgaccatcatcaacgaaggcgacatcaatactcgccgcgttaaatccgtcgctttctgcgcacgcagcattccgcacatgctggagcacttccgtgccggttctctgctggtgacttccgcagaccgtcctgacgtgctggtggccgcttgcctggcagccatgaacggcgtagaaatcggtgccctgctgctgactggcggttacgaaatggacgcgcgcatttctaaactgtgcgaacgtgctttcgctaccggcctgccggtatttatggtgaacaccaacacctggcagacctctctgagcctgcagagcttcaacctggaagttccggttgacgatcacgaacgtatcgagaaagttcaggaatacgttgctaactacatcaacgctgactggatcgaatctctgactgccacttctgagcgcagccgtcgtctgtctccgcctgcgttccgttatcagctgactgaacttgcgcgcaaagcgggcaaacgtatcgtactgccggaaggtgacgaaccgcgtaccgttaaagcagccgctatctgtgctgaacgtggtatcgcaacttgcgtactgctgggtaatccggcagagatcaaccgtgttgcagcgtctcagggtgtagaactgggtgcagggattgaaatcgttgatccagaagtggttcgcgaaagctatgttggtcgtctggtcgaactgcgtaagaacaaaggcatgaccgaaaccgttgcccgcgaacagctggaagacaacgtggtgctcggtacgctgatgctggaacaggatgaagttgatggtctggtttccggtgctgttcacactaccgcaaacaccatccgtccgccgctgcagctgatcaaaactgcaccgggcagctccctggtatcttccgtgttcttcatgctgctgccggaacaggtttacgtttacggtgactgtgcgatcaacccggatccgaccgctgaacagctggcagaaatcgcgattcagtccgctgattccgctgcggccttcggtatcgaaccgcgcgttgctatgctctcctactccaccggtacttctggtgcaggtagcgacgtagaaaaagttcgcgaagcaactcgtctggcgcaggaaaaacgtcctgacctgatgatcgacggtccgctgcagtacgacgctgcggtaatggctgacgttgcgaaatccaaagcgccgaactctccggttgcaggtcgcgctaccgtgttcatcttcccggatctgaacaccggtaacaccacctacaaagcggtacagcgttctgccgacctgatctccatcgggccgatgctgcagggtatgcgcaagccggttaacgacctgtcccgtggcgcactggttgacgatatcgtctacaccatcgcgctgactgcgattcagtctgcacagcagcagtaatctcgtcatcatccgcagctttgcgctgcggatatctgaaccggaaataatcactatttccggttttttattctcttaatttgcattaatcctttctgattatcttgcttaactgcgctgcatcaatgaattgcgccatcccactttgcatacttaccactttgttttgtgcaagggaatatttgcgctatgtccgcaatcactgaatccaaaccaacaagaagatgggcaatgcccgatacgttggtgattatcttttttgttgctattttaaccagccttgccacctgggtagttccggtggggatgtttgacagtcaggaagtgcagtatcaggttgatggtcaaacaaaaacacgcaaagtcgtagatccacacagttttcgcattctgactaacgaagcaggcgaacctgagtatcaccgcgtacagctgttcacgacgggcgatgaacgcccgggcctgatgaacttcccgtttgaaggattaaccagtggaagcaaatacgggacagccgttggcatcatcatgtttatgctggtgattggcggcgcgtttggcattgtgatgcgtacaggaaccattgataacggtatcctggcgcttattcgccatacccgcgggaatgaaattctctttattcctgcgctgtttattctgtttagtcttggcggcgcggtatttggtatgggagaagaggccgtcgcctttgccattatcatcgcaccgctaatggtccggctgggctatgacagtattaccaccgtcctggtgacctatattgccacgcaaatcggttttgccagtagctggatgaacccgttttgtgtggtcgttgctcaggggattgccggcgttccggtgctttctggctccgggttgcgtatcgtggtgtgggttatcgccactctgattggcctgatctttaccatggtgtacgccagtcgagtgaaaaagaatcctcttctgagtcgcgtgcatgagtccgaccgcttctttcgtgaaaagcaggctgatgttgaacaacgtccgtttacctttggtgactggctggtattgattgtcctgaccgccgtaatg
